(19) United States
(12) Patent Application Publication
(10) Pub. No.: US 2012/0227133 A1
(43) Pub. Date: Sep. 6, 2012

(54) Plants Having Enhanced Yield-Related Traits and a Method for Making the Same

(75) Inventors: Yves Hatzfeld, Lille (FR); Christophe Reuzeau, Gent (BE); Valerie Frankard, Waterloo (BE)

(73) Assignee: BASF Plant Science Company GmbH, Ludwigshafen (DE)

(21) Appl. No.: 13/509,120

(22) PCT Filed: Nov. 10, 2010
(86) PCT No.: PCT/EP2010/067164

§ 371 Date: May 10, 2012

Related U.S. Application Data
(60) Provisional application No. 61/260,939, filed on Nov. 13, 2009.
(60) Provisional application No. 61/260,946, filed on Nov. 13, 2009.
(60) Provisional application No. 61/260,935, filed on Nov. 13, 2009.
(60) Provisional application No. 61/285,219, filed on Dec. 10, 2009.
(60) Provisional application No. 61/285,208, filed on Dec. 10, 2009.

(30) Foreign Application Priority Data
Nov. 13, 2009 (EP) 09175922.5
Nov. 13, 2009 (EP) 09175964.7
Nov. 13, 2009 (EP) 09175997.7
Dec. 10, 2009 (EP) 09178693.9
Dec. 10, 2009 (EP) 09178742.4

(51) Int. Cl. A01H 1/06; C12N 15/82; A01H 5/10; C07K 14/415; C12N 5/10; A01H 5/00; C12N 15/29

(52) U.S. Cl. 800/278; 800/298; 435/320.1; 536/23.6; 530/372; 435/419; 800/290; 800/320.2; 800/320.1; 800/320.3; 800/320

(57) ABSTRACT

The present invention relates generally to the field of molecular biology and concerns a method for enhancing various economically important yield-related traits in plants. More specifically, the present invention concerns a method for enhancing yield-related traits in plants by modulating expression in a plant of a nucleic acid encoding an O-FUT polypeptide, or a By-Pass (BPS) polypeptide, or a SIZ1 polypeptide, or a bZIP-S polypeptide, or a SPA15-like polypeptide. The present invention also concerns plants having modulated expression of a nucleic acid encoding an O-FUT polypeptide, or a By-Pass (BPS) polypeptide, or a SIZ1 polypeptide, or a bZIP-S polypeptide, or a SPA15-like polypeptide, which plants have enhanced yield-related traits relative to control plants. The invention also provides hitherto unknown an O-FUT, or By-Pass (BPS) polypeptide, or SIZ1, or bZIP-S, or SPA15-like-encoding nucleic acids, and constructs comprising the same, useful in performing the methods of the invention.

[0001] The present invention relates generally to the field of molecular biology and concerns a method for enhancing yield-related traits in plants by modulating expression in a plant of a nucleic acid encoding a fucose protein O-fucosyltransferase (O-FUT) polypeptide, or a By-Pass (BPS) polypeptide, or a SIZ1 polypeptide, or a bZIP-S polypeptide, or a SPA15-like polypeptide. The present invention also concerns plants having modulated expression of a nucleic acid encoding an O-FUT polypeptide, which plants have enhanced yield-related traits relative to corresponding wild type plants or other control plants. The invention also provides constructs useful in the methods of the invention.

[0002] The ever-increasing world population and the dwindling supply of arable land available for agriculture fuels research towards increasing the efficiency of agriculture. Conventional means for crop and horticultural improvements utilise selective breeding techniques to identify plants having desirable characteristics. However, such selective breeding techniques have several drawbacks, namely that these techniques are typically labour intensive and result in plants that often contain heterogeneous genetic components that may not always result in the desirable trait being passed on from parent plants. Advances in molecular biology have allowed mankind to modify the germplasm of animals and plants. Genetic engineering of plants entails the isolation and manipulation of genetic material (typically in the form of DNA or RNA) and the subsequent introduction of that genetic material into a plant. Such technology has the capacity to deliver crops or plants having various improved economic, agronomic or horticultural traits.

[0003] A trait of particular economic interest is increased yield. Yield is normally defined as the measurable produce of economic value from a crop. This may be defined in terms of quantity and/or quality. Yield is directly dependent on several factors, for example, the number and size of the organs, plant architecture (for example, the number of branches), seed production, leaf senescence and more. Root development, nutrient uptake, stress tolerance and early vigour may also be important factors in determining yield. Optimizing the abovementioned factors may therefore contribute to increasing crop yield.

[0004] Seed yield is a particularly important trait, since the seeds of many plants are important for human and animal nutrition. Crops such as corn, rice, wheat, canola and soybean account for over half the total human caloric intake, whether through direct consumption of the seeds themselves or through consumption of meat products raised on processed seeds. They are also a source of sugars, oils and many kinds of metabolites used in industrial processes. Seeds contain an embryo (the source of new shoots and roots) and an endosperm (the source of nutrients for embryo growth during germination and during early growth of seedlings). The development of a seed involves many genes, and requires the transfer of metabolites from the roots, leaves and stems into the growing seed. The endosperm, in particular, assimilates the metabolic precursors of carbohydrates, oils and proteins and synthesizes them into storage macromolecules to fill out the grain.

[0005] Another important trait for many crops is early vigour. Improving early vigour is an important objective of modern rice breeding programs in both temperate and tropical rice cultivars. Long roots are important for proper soil anchorage in water-seeded rice. Where rice is sown directly into flooded fields, and where plants must emerge rapidly through water, longer shoots are associated with vigour. Where drill-seeding is practiced, longer mesocotyls and coleoptiles are important for good seedling emergence. The ability to engineer early vigour into plants would be of great importance in agriculture. For example, poor early vigour has been a limitation to the introduction of maize (Zea mays L.) hybrids based on Corn Belt germplasm in the European Atlantic.

[0006] A further important trait is that of improved abiotic stress tolerance. Abiotic stress is a primary cause of crop loss worldwide, reducing average yields for most major crop plants by more than 50% (Wang et al., Planta 218, 1-14, 2003). Abiotic stresses may be caused by drought, salinity, extremes of temperature, chemical toxicity and oxidative stress. The ability to improve plant tolerance to abiotic stress would be of great economic advantage to farmers worldwide and would allow for the cultivation of crops during adverse conditions and in territories where cultivation of crops may not otherwise be possible.

[0007] Crop yield may therefore be increased by optimising one of the above-mentioned factors.

[0008] Depending on the end use, the modification of certain yield traits may be favoured over others. For example for applications such as forage or wood production, or bio-fuel resource, an increase in the vegetative parts of a plant may be desirable, and for applications such as flour, starch or oil production, an increase in seed parameters may be particularly desirable. Even amongst the seed parameters, some may be favoured over others, depending on the application. Various mechanisms may contribute to increasing seed yield, whether that is in the form of increased seed size or increased seed number.

[0009] One approach to increasing yield (seed yield and/or biomass) in plants may be through modification of the inherent growth mechanisms of a plant, such as the cell cycle or various signalling pathways involved in plant growth or in defense mechanisms.

[0010] It has now been found that various yield-related traits may be improved in plants by modulating expression in a plant of a nucleic acid encoding a fucose protein O-fucosyltransferase (O-FUT) polypeptide, or a By-Pass (BPS) polypeptide, or a SIZ1 polypeptide, or a bZIP-S polypeptide, or a SPA15-like polypeptide, in a plant.

### BACKGROUND

[0011] Plant small ubiquitin-like modifier (SUMO) E3 ligase is a focal controller of Pi starvation-dependent responses. Said polypeptide is also required for SA and PAD4-mediated R gene signaling, which in turn confers innate immunity in the plant. SUMO E3 ligases of the PIAS/SIZ family facilitate SUMO conjugation to lysine (K) residues in the SUMO consensus motif, YKXE/D (Y, a large hydrophobic residue; K, the acceptor lysine; X, any amino acid; E/D, glutamate or aspartate), located in protein substrates (Jin et al., 2008). SUMO modification of target proteins in yeast and metazoans has been implicated in the regulation of innate immunity, cell-cycle progression and mitosis, DNA repair, chromatin stability, nucleocytoplasmic trafficking, subnuclear targeting, ubiquitination antagonism and transcriptional regulation (Johnson, 2004; Gill, 2005). Sumoylation in plants is reported to be involved in biotic and abiotic stress responses, flowering and development (Chosed et al., 2006; Downes and Vierstra, 2005; Kurepa et al., 2003; Lee et al., 2007; Miura et al., 2005, 2007; Novatchkova et al., 2004; Yoo et al., 2006).

[0012] Growth and development of all organisms depend on proper regulation of gene expression. The control of transcription initiation rates by transcription factors (TF) represents one of the most important means of modulating gene expression. TFs can be grouped into different protein families according to their primary and/or three-dimensional structure similarities in the DNA-binding and multimerization domains. Transcription factors (TFs) play crucial roles in almost all biological processes. Structurally, the basic region/leucine zipper (bZIP) class of TFs are usually classified by their DNA-binding domains, a basic region, and a leucine zipper dimerisation motif. Dimerisation may occur in homo or hererodimerisation. A common partner in dimarisation of bZIP TFs are TFs of the bHLH family. Proteins with bZIP domains are present in all eukaryotes analysed to date. Some, such as Jun/Fos or CREB, have been studied extensively in animals and serve as models for understanding TF-DNA interactions, ternary complex formation and TF post-translational modifications (Jakoby et al. 2002 TRENDS in Plant Science Vol. 7. No. 3 106_{—}111). In plants, basic region/leucine zipper motif (bZIP) transcription factors regulate processes including pathogen defence, light and stress signaling, seed maturation and flower development. The Arabidopsis genome sequence contains more than 75 distinct members of the bZIP family. Using phylogenetic analysis and common domains, the flowering plants bZIP TFs family has been subdivided into thirteen homologous groups. In Arabidopsis, rice and black cottonwood members of Group S of bZIPs TFs share two characteristics: they harbor a long leucine zipper (eight to nine heptads) and are encoded by intron-less genes.

[0013] Genes associated with leaf senescence have been studied since late 90s with the purpose to better understand the molecular mechanisms which are in the basis of leaf senescence. A wide range of senescence-associated genes (SAGs) were therefore identified, cloned and characterised from different plant origin such as A. thaliana, B. napus, tomato, maize, barley, sweet potato, rice, etc. However, many other SAGs remain unknown. Several SAGs genes, including SPA15 gene were cloned and characterised (Huang, Y.-J. et al. (2001)—Cloning and characterization of leaf senescence up-regulated genes in sweet potato. Physiolog. Plantarum, 113: 384-391). Expression patterns of SPA15 suggest that it is highly specifically expressed in senescing leaves and SPA15 protein is a cell wall-associated protein Said expression is not influenced by growth-enhancing hormones, such as auxin, cytokinin, gibberllin, but is strongly induced by ethylene. (Yap M. N. et al. (2003)-Molecular characterization of a novel senescence-associated gene SPA15 induced during leaf senescence in sweet potato. Plant Molecular Biology 51: 471-481).

### SUMMARY

### 1. O-FUT-Like Polypeptides

[0014] Surprisingly, it has now been found that modulating expression of a nucleic acid encoding an O-FUT polypeptide gives plants having enhanced yield-related traits, in particular increased yield relative to control plants.

[0015] According one embodiment, there is provided a method for improving yield-related traits in plants relative to control plants, comprising modulating expression in a plant of a nucleic acid encoding an O-FUT polypeptide.

### 2. By-Pass-Like Polypeptides

[0016] Surprisingly, it has now been found that modulating expression of a nucleic acid encoding a BPS polypeptide gives plants having enhanced yield-related traits, in particular increased seed yield relative to control plants.

[0017] According one embodiment, there is provided a method for improving yield-related traits in plants relative to control plants, comprising modulating expression in a plant of a nucleic acid encoding a BPS polypeptide.

### 3. SIZ1-Like Polypeptides

[0018] Surprisingly, it has now been found that modulating expression of a nucleic acid encoding a SIZ1 polypeptide gives plants having enhanced yield-related traits, in increased seed yield relative to control plants.

[0019] According one embodiment, there is provided a method for improving yield-related traits in plants relative to control plants, comprising modulating expression in a plant of a nucleic acid encoding a SIZ1 polypeptide.

4. bZIP-S-Like Polypeptides

[0020] Surprisingly, it has now been found that modulating expression of a nucleic acid encoding a bZIP-S polypeptide gives plants having enhanced yield-related traits, relative to control plants.

[0021] According one embodiment, there is provided a method for improving yield-related traits in plants relative to control plants, comprising modulating expression in a plant of a nucleic acid encoding a bZIP-S polypeptide.

### 5. SPA15-Like Polypeptide

[0022] Surprisingly, it has now been found that modulating expression of a nucleic acid encoding a SPA15-like polypeptide gives plants having enhanced yield-related traits, in particular increased seed yield relative to control plants.

[0023] According one embodiment, there is provided a method for improving yield-related traits in plants relative to control plants, comprising modulating expression in a plant of a nucleic acid encoding a SPA15-like polypeptide.

### DEFINITIONS

### Polypeptide(s)/Protein(s)

[0024] The terms “polypeptide” and “protein” are used interchangeably herein and refer to amino acids in a polymeric form of any length, linked together by peptide bonds.

### Polynucleotide(s)/Nucleic Acid(s)/Nucleic Acid Sequence(s)/Nucleotide Sequence(s)

[0025] The terms “polynucleotide(s)”, “nucleic acid sequence(s)”, “nucleotide sequence(s)”, “nucleic acid(s)”, “nucleic acid molecule” are used interchangeably herein and refer to nucleotides, either ribonucleotides or deoxyribonucleotides or a combination of both, in a polymeric unbranched form of any length.

### Homologue(s)

[0026] “Homologues” of a protein encompass peptides, oligopeptides, polypeptides, proteins and enzymes having amino acid substitutions, deletions and/or insertions relative to the unmodified protein in question and having similar biological and functional activity as the unmodified protein from which they are derived.

[0027] A deletion refers to removal of one or more amino acids from a protein.

[0028] An insertion refers to one or more amino acid residues being introduced into a predetermined site in a protein. Insertions may comprise N-terminal and/or C-terminal fusions as well as intra-sequence insertions of single or multiple amino acids. Generally, insertions within the amino acid sequence will be smaller than N- or C-terminal fusions, of the order of about 1 to 10 residues. Examples of N- or C-terminal fusion proteins or peptides include the binding domain or activation domain of a transcriptional activator as used in the yeast two-hybrid system, phage coat proteins, (histidine)-6-tag, glutathione S-transferase-tag, protein A, maltose-binding protein, dihydrofolate reductase, Tag•100 epitope, c-myc epitope, FLAG®-epitope, lacZ, CMP (calmodulin-binding peptide), HA epitope, protein C epitope and VSV epitope.

[0029] A substitution refers to replacement of amino acids of the protein with other amino acids having similar properties (such as similar hydrophobicity, hydrophilicity, antigenicity, propensity to form or break α-helical structures or β-sheet structures). Amino acid substitutions are typically of single residues, but may be clustered depending upon functional constraints placed upon the polypeptide and may range from 1 to 10 amino acids; insertions will usually be of the order of about 1 to 10 amino acid residues. The amino acid substitutions are preferably conservative amino acid substitutions. Conservative substitution tables are well known in the art (see for example Creighton (1984) Proteins. W.H. Freeman and Company (Eds) and Table 1 below).

TABLE 1
Examples of conserved amino acid substitutions

| | Conservative | | Conservative |
|---|---|---|---|
| Residue | Substitutions | Residue | Substitutions |
| Ala | Ser | Leu | Ile; Val |
| Arg | Lys | Lys | Arg; Gln |
| Asn | Gln; His | Met | Leu; Ile |
| Asp | Glu | Phe | Met; Leu; Tyr |
| Gln | Asn | Ser | Thr; Gly |
| Cys | Ser | Thr | Ser; Val |
| Glu | Asp | Trp | Tyr |
| Gly | Pro | Tyr | Trp; Phe |
| His | Asn; Gln | Val | Ile; Leu |
| Ile | Leu, Val | | |

[0030] Amino acid substitutions, deletions and/or insertions may readily be made using peptide synthetic techniques well known in the art, such as solid phase peptide synthesis and the like, or by recombinant DNA manipulation. Methods for the manipulation of DNA sequences to produce substitution, insertion or deletion variants of a protein are well known in the art. For example, techniques for making substitution mutations at predetermined sites in DNA are well known to those skilled in the art and include M13 mutagenesis, T7-Gen in vitro mutagenesis (USB, Cleveland, Ohio), QuickChange Site Directed mutagenesis (Stratagene, San Diego, Calif.), PCR-mediated site-directed mutagenesis or other site-directed mutagenesis protocols.

### Derivatives

[0031] “Derivatives” include peptides, oligopeptides, polypeptides which may, compared to the amino acid sequence of the naturally-occurring form of the protein, such as the protein of interest, comprise substitutions of amino acids with non-naturally occurring amino acid residues, or additions of non-naturally occurring amino acid residues. “Derivatives” of a protein also encompass peptides, oligopeptides, polypeptides which comprise naturally occurring altered (glycosylated, acylated, prenylated, phosphorylated, myristoylated, sulphated etc.) or non-naturally altered amino acid residues compared to the amino acid sequence of a naturally-occurring form of the polypeptide. A derivative may also comprise one or more non-amino acid substituents or additions compared to the amino acid sequence from which it is derived, for example a reporter molecule or other ligand, covalently or non-covalently bound to the amino acid sequence, such as a reporter molecule which is bound to facilitate its detection, and non-naturally occurring amino acid residues relative to the amino acid sequence of a naturally-occurring protein. Furthermore, “derivatives” also include fusions of the naturally-occurring form of the protein with tagging peptides such as FLAG, HIS6 or thioredoxin (for a review of tagging peptides, see Terpe, Appl. Microbiol. Biotechnol. 60, 523-533, 2003).

### Orthologue(s)/Paralogue(s)

[0032] Orthologues and paralogues encompass evolutionary concepts used to describe the ancestral relationships of genes. Paralogues are genes within the same species that have originated through duplication of an ancestral gene; orthologues are genes from different organisms that have originated through speciation, and are also derived from a common ancestral gene.

### Domain, Motif/Consensus Sequence/Signature

[0033] The term “domain” refers to a set of amino acids conserved at specific positions along an alignment of sequences of evolutionarily related proteins. While amino acids at other positions can vary between homologues, amino acids that are highly conserved at specific positions indicate amino acids that are likely essential in the structure, stability or function of a protein. Identified by their high degree of conservation in aligned sequences of a family of protein homologues, they can be used as identifiers to determine if any polypeptide in question belongs to a previously identified polypeptide family.

[0034] The term “motif” or “consensus sequence” or “signature” refers to a short conserved region in the sequence of evolutionarily related proteins. Motifs are frequently highly conserved parts of domains, but may also include only part of the domain, or be located outside of conserved domain (if all of the amino acids of the motif fall outside of a defined domain).

[0035] Specialist databases exist for the identification of domains, for example, SMART (Schultz et al. (1998) Proc. Natl. Acad. Sci. USA 95, 5857-5864; Letunic et al. (2002) Nucleic Acids Res 30, 242-244), InterPro (Mulder et al., (2003) Nucl. Acids. Res. 31, 315-318), Prosite (Bucher and Bairoch (1994), A generalized profile syntax for biomolecular sequences motifs and its function in automatic sequence interpretation. (In) ISMB-94; Proceedings 2nd International Conference on Intelligent Systems for Molecular Biology. Altman R., Brutlag D., Karp P., Lathrop R., Searls D., Eds., pp 53-61, AAAI Press, Menlo Park; Hulo et al., Nucl. Acids. Res. 32:D134-D137, (2004)), or Pfam (Bateman et al., Nucleic Acids Research 30(1): 276-280 (2002)). A set of tools for in silico analysis of protein sequences is available on the ExPASy proteomics server (Swiss Institute of Bioinformatics (Gasteiger et al., ExPASy: the proteomics server for in-depth protein knowledge and analysis, Nucleic Acids Res. 31:3784-3788 (2003)). Domains or motifs may also be identified using routine techniques, such as by sequence alignment.

[0036] Methods for the alignment of sequences for comparison are well known in the art, such methods include GAP, BESTFIT, BLAST, FASTA and TFASTA. GAP uses the algorithm of Needleman and Wunsch ((1970) J Mol Biol 48: 443-453) to find the global (i.e. spanning the complete sequences) alignment of two sequences that maximizes the number of matches and minimizes the number of gaps. The BLAST algorithm (Altschul et al. (1990) J Mol Biol 215: 403-10) calculates percent sequence identity and performs a statistical analysis of the similarity between the two sequences. The software for performing BLAST analysis is publicly available through the National Centre for Biotechnology Information (NCBI). Homologues may readily be identified using, for example, the ClustalW multiple sequence alignment algorithm (version 1.83), with the default pairwise alignment parameters, and a scoring method in percentage. Global percentages of similarity and identity may also be determined using one of the methods available in the MatGAT software package (Campanella et al., BMC Bioinformatics. 2003 Jul. 10; 4:29. MatGAT: an application that generates similarity/identity matrices using protein or DNA sequences.). Minor manual editing may be performed to optimise alignment between conserved motifs, as would be apparent to a person skilled in the art. Furthermore, instead of using full-length sequences for the identification of homologues, specific domains may also be used. The sequence identity values may be determined over the entire nucleic acid or amino acid sequence or over selected domains or conserved motif(s), using the programs mentioned above using the default parameters. For local alignments, the Smith-Waterman algorithm is particularly useful (Smith T F, Waterman M S (1981) J. Mol. Biol. 147(1); 195-7).

### Reciprocal BLAST

[0037] Typically, this involves a first BLAST involving BLASTing a query sequence (for example using any of the sequences listed in Table A of the Examples section) against any sequence database, such as the publicly available NCBI database. BLASTN or TBLASTX (using standard default values) are generally used when starting from a nucleotide sequence, and BLASTP or TBLASTN (using standard default values) when starting from a protein sequence. The BLAST results may optionally be filtered. The full-length sequences of either the filtered results or non-filtered results are then BLASTed back (second BLAST) against sequences from the organism from which the query sequence is derived. The results of the first and second BLASTs are then compared. A paralogue is identified if a high-ranking hit from the first blast is from the same species as from which the query sequence is derived, a BLAST back then ideally results in the query sequence amongst the highest hits; an orthologue is identified if a high-ranking hit in the first BLAST is not from the same species as from which the query sequence is derived, and preferably results upon BLAST back in the query sequence being among the highest hits.

[0038] High-ranking hits are those having a low E-value. The lower the E-value, the more significant the score (or in other words the lower the chance that the hit was found by chance). Computation of the E-value is well known in the art. In addition to E-values, comparisons are also scored by percentage identity. Percentage identity refers to the number of identical nucleotides (or amino acids) between the two compared nucleic acid (or polypeptide) sequences over a particular length. In the case of large families, ClustalW may be used, followed by a neighbour joining tree, to help visualize clustering of related genes and to identify orthologues and paralogues.

### Hybridisation

[0039] The term “hybridisation” as defined herein is a process wherein substantially homologous complementary nucleotide sequences anneal to each other. The hybridisation process can occur entirely in solution, i.e. both complementary nucleic acids are in solution. The hybridisation process can also occur with one of the complementary nucleic acids immobilised to a matrix such as magnetic beads, Sepharose beads or any other resin. The hybridisation process can furthermore occur with one of the complementary nucleic acids immobilised to a solid support such as a nitro-cellulose or nylon membrane or immobilised by e.g. photolithography to, for example, a siliceous glass support (the latter known as nucleic acid arrays or microarrays or as nucleic acid chips). In order to allow hybridisation to occur, the nucleic acid molecules are generally thermally or chemically denatured to melt a double strand into two single strands and/or to remove hairpins or other secondary structures from single stranded nucleic acids.

[0040] The term “stringency” refers to the conditions under which a hybridisation takes place. The stringency of hybridisation is influenced by conditions such as temperature, salt concentration, ionic strength and hybridisation buffer composition. Generally, low stringency conditions are selected to be about 30° C. lower than the thermal melting point (Tₘ) for the specific sequence at a defined ionic strength and pH. Medium stringency conditions are when the temperature is 20° C. below Tₘ, and high stringency conditions are when the temperature is 10° C. below Tₘ. High stringency hybridisation conditions are typically used for isolating hybridising sequences that have high sequence similarity to the target nucleic acid sequence. However, nucleic acids may deviate in sequence and still encode a substantially identical polypeptide, due to the degeneracy of the genetic code. Therefore medium stringency hybridisation conditions may sometimes be needed to identify such nucleic acid molecules.

[0041] The Tm is the temperature under defined ionic strength and pH, at which 50% of the target sequence hybridises to a perfectly matched probe. The Tₘ is dependent upon the solution conditions and the base composition and length of the probe. For example, longer sequences hybridise specifically at higher temperatures. The maximum rate of hybridisation is obtained from about 16° C. up to 32° C. below Tₘ. The presence of monovalent cations in the hybridisation solution reduce the electrostatic repulsion between the two nucleic acid strands thereby promoting hybrid formation; this effect is visible for sodium concentrations of up to 0.4M (for higher concentrations, this effect may be ignored). Formamide reduces the melting temperature of DNA-DNA and DNA-RNA duplexes with 0.6 to 0.7° C. for each percent formamide, and addition of 50% formamide allows hybridisation to be performed at 30 to 45° C., though the rate of hybridisation will be lowered. Base pair mismatches reduce the hybridisation rate and the thermal stability of the duplexes. On average and for large probes, the Tm decreases about 1° C. per % base mismatch. The Tm may be calculated using the following equations, depending on the types of hybrids:

1) DNA-DNA hybrids (Meinkoth and Wahl, Anal. Biochem., 138: 267-284, 1984):

Tₘ=81.5° C.+16.6×log₁₀[Na⁺]^{a}+0.41×%[G/C^{b}]−500×[L^{c}]⁻¹−0.61×% formamide

### 2) DNA-RNA or RNA-RNA Hybrids:

[0042] Tm=79.8+18.5(log₁₀[Na⁺]^{a})+0.58(%G/C^{b})+11.8(%G/C^{b})²−820/L^{c}

### 3) Oligo-DNA or Oligo-RNA^{d} Hybrids:

[0043] For <20 nucleotides: Tₘ=2 (Iₙ)

For 20-35 nucleotides: Tₘ=22+1.46 (Iₙ)
[0044] ^{a} or for other monovalent cation, but only accurate in the 0.01-0.4 M range.
[0045] ^{b} only accurate for % GC in the 30% to 75% range.
[0046] ^{c} L=length of duplex in base pairs.
[0047] ^{d} oligo, oligonucleotide; Iₙ,=effective length of primer=2×(no. of G/C)+(no. of A/T).

[0048] Non-specific binding may be controlled using any one of a number of known techniques such as, for example, blocking the membrane with protein containing solutions, additions of heterologous RNA, DNA, and SDS to the hybridisation buffer, and treatment with Rnase. For non-homologous probes, a series of hybridizations may be performed by varying one of (i) progressively lowering the annealing temperature (for example from 68° C. to 42° C.) or (ii) progressively lowering the formamide concentration (for example from 50% to 0%). The skilled artisan is aware of various parameters which may be altered during hybridisation and which will either maintain or change the stringency conditions.

[0049] Besides the hybridisation conditions, specificity of hybridisation typically also depends on the function of post-hybridisation washes. To remove background resulting from non-specific hybridisation, samples are washed with dilute salt solutions. Critical factors of such washes include the ionic strength and temperature of the final wash solution: the lower the salt concentration and the higher the wash temperature, the higher the stringency of the wash. Wash conditions are typically performed at or below hybridisation stringency. A positive hybridisation gives a signal that is at least twice of that of the background. Generally, suitable stringent conditions for nucleic acid hybridisation assays or gene amplification detection procedures are as set forth above. More or less stringent conditions may also be selected. The skilled artisan is aware of various parameters which may be altered during washing and which will either maintain or change the stringency conditions. For example, typical high stringency hybridisation conditions for DNA hybrids longer than 50 nucleotides encompass hybridisation at 65° C. in 1×SSC or at 42° C. in 1×SSC and 50% formamide, followed by washing at 65° C. in 0.3×SSC. Examples of medium stringency hybridisation conditions for DNA hybrids longer than 50 nucleotides encompass hybridisation at 50° C. in 4×SSC or at 40° C. in 6×SSC and 50% formamide, followed by washing at 50° C. in 2×SSC. The length of the hybrid is the anticipated length for the hybridising nucleic acid. When nucleic acids of known sequence are hybridised, the hybrid length may be determined by aligning the sequences and identifying the conserved regions described herein. 1×SSC is 0.15M NaCl and 15 mM sodium citrate; the hybridisation solution and wash solutions may additionally include 5×Denhardt's reagent, 0.5-1.0% SDS, 100 μg/ml denatured, fragmented salmon sperm DNA, 0.5% sodium pyrophosphate.

[0050] For the purposes of defining the level of stringency, reference can be made to Sambrook et al. (2001) Molecular Cloning: a laboratory manual, 3rd Edition, Cold Spring Harbor Laboratory Press, CSH, New York or to Current Protocols in Molecular Biology, John Wiley & Sons, N.Y. (1989 and yearly updates).

### Splice Variant

[0051] The term “splice variant” as used herein encompasses variants of a nucleic acid sequence in which selected introns and/or exons have been excised, replaced, displaced or added, or in which introns have been shortened or lengthened. Such variants will be ones in which the biological activity of the protein is substantially retained; this may be achieved by selectively retaining functional segments of the protein. Such splice variants may be found in nature or may be manmade. Methods for predicting and isolating such splice variants are well known in the art (see for example Foissac and Schiex (2005) BMC Bioinformatics 6: 25).

### Allelic Variant

[0052] Alleles or allelic variants are alternative forms of a given gene, located at the same chromosomal position. Allelic variants encompass Single Nucleotide Polymorphisms (SNPs), as well as Small Insertion/Deletion Polymorphisms (INDELs). The size of INDELs is usually less than 100 bp. SNPs and INDELs form the largest set of sequence variants in naturally occurring polymorphic strains of most organisms.

### Endogenous Gene

[0053] Reference herein to an “endogenous” gene not only refers to the gene in question as found in a plant in its natural form (i.e., without there being any human intervention), but also refers to that same gene (or a substantially homologous nucleic acid/gene) in an isolated form subsequently (re)introduced into a plant (a transgene). For example, a transgenic plant containing such a transgene may encounter a substantial reduction of the transgene expression and/or substantial reduction of expression of the endogenous gene. The isolated gene may be isolated from an organism or may be manmade, for example by chemical synthesis.

### Gene Shuffling/Directed Evolution

[0054] Gene shuffling or directed evolution consists of iterations of DNA shuffling followed by appropriate screening and/or selection to generate variants of nucleic acids or portions thereof encoding proteins having a modified biological activity (Castle et al., (2004) Science 304(5674): 1151-4; U.S. Pat. Nos. 5,811,238 and 6,395,547).

### Construct

[0055] Additional regulatory elements may include transcriptional as well as translational enhancers. Those skilled in the art will be aware of terminator and enhancer sequences that may be suitable for use in performing the invention. An intron sequence may also be added to the 5′ untranslated region (UTR) or in the coding sequence to increase the amount of the mature message that accumulates in the cytosol, as described in the definitions section. Other control sequences (besides promoter, enhancer, silencer, intron sequences, 3′UTR and/or 5′UTR regions) may be protein and/or RNA stabilizing elements. Such sequences would be known or may readily be obtained by a person skilled in the art.

[0056] The genetic constructs of the invention may further include an origin of replication sequence that is required for maintenance and/or replication in a specific cell type. One example is when a genetic construct is required to be maintained in a bacterial cell as an episomal genetic element (e.g. plasmid or cosmid molecule). Preferred origins of replication include, but are not limited to, the f1-ori and colE1.

[0057] For the detection of the successful transfer of the nucleic acid sequences as used in the methods of the invention and/or selection of transgenic plants comprising these nucleic acids, it is advantageous to use marker genes (or reporter genes). Therefore, the genetic construct may optionally comprise a selectable marker gene. Selectable markers are described in more detail in the “definitions” section herein. The marker genes may be removed or excised from the transgenic cell once they are no longer needed. Techniques for marker removal are known in the art, useful techniques are described above in the definitions section.

### Regulatory Element/Control Sequence/Promoter

[0058] The terms “regulatory element”, “control sequence” and “promoter” are all used interchangeably herein and are to be taken in a broad context to refer to regulatory nucleic acid sequences capable of effecting expression of the sequences to which they are ligated. The term “promoter” typically refers to a nucleic acid control sequence located upstream from the transcriptional start of a gene and which is involved in recognising and binding of RNA polymerase and other proteins, thereby directing transcription of an operably linked nucleic acid. Encompassed by the aforementioned terms are transcriptional regulatory sequences derived from a classical eukaryotic genomic gene (including the TATA box which is required for accurate transcription initiation, with or without a CCAAT box sequence) and additional regulatory elements (i.e. upstream activating sequences, enhancers and silencers) which alter gene expression in response to developmental and/or external stimuli, or in a tissue-specific manner. Also included within the term is a transcriptional regulatory sequence of a classical prokaryotic gene, in which case it may include a −35 box sequence and/or −10 box transcriptional regulatory sequences. The term “regulatory element” also encompasses a synthetic fusion molecule or derivative that confers, activates or enhances expression of a nucleic acid molecule in a cell, tissue or organ.

[0059] A “plant promoter” comprises regulatory elements, which mediate the expression of a coding sequence segment in plant cells. Accordingly, a plant promoter need not be of plant origin, but may originate from viruses or micro-organisms, for example from viruses which attack plant cells. The “plant promoter” can also originate from a plant cell, e.g. from the plant which is transformed with the nucleic acid sequence to be expressed in the inventive process and described herein. This also applies to other “plant” regulatory signals, such as “plant” terminators. The promoters upstream of the nucleotide sequences useful in the methods of the present invention can be modified by one or more nucleotide substitution(s), insertion(s) and/or deletion(s) without interfering with the functionality or activity of either the promoters, the open reading frame (ORF) or the 3′-regulatory region such as terminators or other 3′ regulatory regions which are located away from the ORF. It is furthermore possible that the activity of the promoters is increased by modification of their sequence, or that they are replaced completely by more active promoters, even promoters from heterologous organisms. For expression in plants, the nucleic acid molecule must, as described above, be linked operably to or comprise a suitable promoter which expresses the gene at the right point in time and with the required spatial expression pattern.

[0060] For the identification of functionally equivalent promoters, the promoter strength and/or expression pattern of a candidate promoter may be analysed for example by operably linking the promoter to a reporter gene and assaying the expression level and pattern of the reporter gene in various tissues of the plant. Suitable well-known reporter genes include for example beta-glucuronidase or beta-galactosidase. The promoter activity is assayed by measuring the enzymatic activity of the beta-glucuronidase or beta-galactosidase. The promoter strength and/or expression pattern may then be compared to that of a reference promoter (such as the one used in the methods of the present invention). Alternatively, promoter strength may be assayed by quantifying mRNA levels or by comparing mRNA levels of the nucleic acid used in the methods of the present invention, with mRNA levels of housekeeping genes such as 18S rRNA, using methods known in the art, such as Northern blotting with densitometric analysis of autoradiograms, quantitative real-time PCR or RT-PCR (Heid et al., 1996 Genome Methods 6: 986-994). Generally by “weak promoter” is intended a promoter that drives expression of a coding sequence at a low level. By “low level” is intended at levels of about 1/10,000 transcripts to about 1/100,000 transcripts, to about 1/500,0000 transcripts per cell. Conversely, a “strong promoter” drives expression of a coding sequence at high level, or at about 1/10 transcripts to about 1/100 transcripts to about 1/1000 transcripts per cell. Generally, by “medium strength promoter” is intended a promoter that drives expression of a coding sequence at a lower level than a strong promoter, in particular at a level that is in all instances below that obtained when under the control of a 35S CaMV promoter.

### Operably Linked

[0061] The term “operably linked” as used herein refers to a functional linkage between the promoter sequence and the gene of interest, such that the promoter sequence is able to initiate transcription of the gene of interest.

### Constitutive Promoter

[0062] A “constitutive promoter” refers to a promoter that is transcriptionally active during most, but not necessarily all, phases of growth and development and under most environmental conditions, in at least one cell, tissue or organ. Table 2a below gives examples of constitutive promoters.

TABLE 2a
Examples of constitutive promoters

| Gene Source | Reference |
|---|---|
| Actin | McElroy et al, Plant Cell, 2: 163-171, 1990 |
| HMGP | WO 2004/070039 |
| CAMV 35S | Odell et al, Nature, 313: 810-812, 1985 |
| CaMV 19S | Nilsson et al., Physiol. Plant. 100: 456-462, 1997 |
| GOS2 | de Pater et al, Plant J Nov; 2(6): 837-44, 1992, |
| | WO 2004/065596 |
| Ubiquitin | Christensen et al, Plant Mol. Biol. 18: 675-689, |
| | 1992 |
| Rice cyclophilin | Buchholz et al, Plant Mol Biol. 25(5): 837-43, 1994 |
| Maize H3 histone | Lepetit et al, Mol. Gen. Genet. 231: 276-285, 1992 |
| Alfalfa H3 histone | Wu et al. Plant Mol. Biol. 11: 641-649, 1988 |
| Actin 2 | An et al, Plant J. 10(1); 107-121, 1996 |
| 34S FMV | Sanger et al., Plant. Mol. Biol., 14, 1990: 433-443 |
| Rubisco small | U.S. Pat. No. 4,962,028 |
| subunit | |
| OCS | Leisner (1988) Proc Natl Acad Sci USA 85(5): 2553 |
| SAD1 | Jain et al., Crop Science, 39 (6), 1999: 1696 |
| SAD2 | Jain et al., Crop Science, 39 (6), 1999: 1696 |
| nos | Shaw et al. (1984) Nucleic Acids Res. 12(20): |
| | 7831-7846 |
| V-ATPase | WO 01/14572 |
| Super promoter | WO 95/14098 |
| G-box proteins | WO 94/12015 |

### Ubiquitous Promoter

[0063] A ubiquitous promoter is active in substantially all tissues or cells of an organism.

### Developmentally-Regulated Promoter

[0064] A developmentally-regulated promoter is active during certain developmental stages or in parts of the plant that undergo developmental changes.

### Inducible Promoter

[0065] An inducible promoter has induced or increased transcription initiation in response to a chemical (for a review see Gatz 1997, Annu. Rev. Plant Physiol. Plant Mol. Biol., 48:89-108), environmental or physical stimulus, or may be “stress-inducible”, i.e. activated when a plant is exposed to various stress conditions, or a “pathogen-inducible” i.e. activated when a plant is exposed to exposure to various pathogens.

### Organ-Specific/Tissue-Specific Promoter

[0066] An organ-specific or tissue-specific promoter is one that is capable of preferentially initiating transcription in certain organs or tissues, such as the leaves, roots, seed tissue etc. For example, a “root-specific promoter” is a promoter that is transcriptionally active predominantly in plant roots, substantially to the exclusion of any other parts of a plant, whilst still allowing for any leaky expression in these other plant parts. Promoters able to initiate transcription in certain cells only are referred to herein as “cell-specific”.

[0067] Examples of root-specific promoters are listed in Table 2b below:

TABLE 2b
Examples of root-specific promoters

| Gene Source | Reference |
|---|---|
| RCc3 | Plant Mol Biol. 1995 Jan; 27(2): 237-48 |
| Arabidopsis PHT1 | Kovama et al., 2005; Mudge et al. |
| | (2002, Plant J. 31: 341) |
| Medicago phosphate | Xiao et al., 2006 |
| transporter | |
| Arabidopsis Pyk10 | Nitz et al. (2001) Plant Sci 161(2): 337-346 |
| root-expressible genes | Tingey et al., EMBO J. 6: 1, 1987. |
| tobacco auxin-inducible | Van der Zaal et al., Plant Mol. Biol. 16, 983, |
| gene | 1991. |
| β-tubulin | Oppenheimer, et al., Gene 63: 87, 1988. |
| tobacco root-specific | Conkling, et al., Plant Physiol. 93: 1203, 1990. |
| genes | |
| B. napus G1-3b gene | U.S. Pat. No. 5,401,836 |
| SbPRP1 | Suzuki et al., Plant Mol. Biol. 21: 109-119, |
| | 1993. |
| LRX1 | Baumberger et al. 2001, Genes & Dev. 15: |
| | 1128 |
| BTG-26 Brassica napus | US 20050044585 |
| LeAMT1 (tomato) | Lauter et al. (1996, PNAS 3: 8139) |
| The LeNRT1-1 (tomato) | Lauter et al. (1996, PNAS 3: 8139) |
| class I patatin gene | Liu et al., Plant Mol. Biol. 153: 386-395, 1991. |
| (potato) | |
| KDC1 (Daucus carota) | Downey et al. (2000, J. Biol. Chem. 275: |
| | 39420) |
| TobRB7 gene | W Song (1997) PhD Thesis, North |
| | Carolina State University, Raleigh, NC USA |
| OsRAB5a (rice) | Wang et al. 2002, Plant Sci. 163: 273 |
| ALF5 (Arabidopsis) | Diener et al. (2001, Plant Cell 13: 1625) |
| NRT2; 1Np | Quesada et al. (1997, Plant Mol. Biol. 34: 265) |
| (N. plumbaginifolia) | |

[0068] A seed-specific promoter is transcriptionally active predominantly in seed tissue, but not necessarily exclusively in seed tissue (in cases of leaky expression). The seed-specific promoter may be active during seed development and/or during germination. The seed specific promoter may be endosperm/aleurone/embryo specific. Examples of seed-specific promoters (endosperm/aleurone/embryo specific) are shown in Table 2c to Table 2f below. Further examples of seed-specific promoters are given in Qing Qu and Takaiwa (Plant Biotechnol. J. 2, 113-125, 2004), which disclosure is incorporated by reference herein as if fully set forth.

TABLE 2c
Examples of seed-specific promoters

| Gene source | Reference |
|---|---|
| seed-specific genes | Simon et al., Plant Mol. Biol. 5: 191, 1985; |
| | Scofield et al., J. Biol. Chem. 262: 12202, 1987.; |
| | Baszczynski et al., Plant Mol. Biol. 14: 633, 1990. |
| Brazil Nut albumin | Pearson et al., Plant Mol. Biol. 18: 235-245, 1992. |
| legumin | Ellis et al., Plant Mol. Biol. 10: 203-214, 1988. |
| glutelin (rice) | Takaiwa et al., Mol. Gen. Genet. 208: 15-22, 1986; |
| | Takaiwa et al., FEBS Letts. 221: 43-47, 1987. |
| zein | Matzke et al Plant Mol Biol, 14(3): 323-32 1990 |
| napA | Stalberg et al, Planta 199: 515-519, 1996. |
| wheat LMW and | Mol Gen Genet 216: 81-90, 1989; NAR 17: |
| HMW glutenin-1 | 461-2, 1989 |
| wheat SPA | Albani et al, Plant Cell, 9: 171-184, 1997 |
| wheat α,β,γ-gliadins | EMBO J. 3: 1409-15, 1984 |
| barley Itr1 promoter | Diaz et al. (1995) Mol Gen Genet 248(5): 592-8 |
| barley B1, C, D, | Theor Appl Gen 98: 1253-62, 1999; Plant J 4: |
| hordein | 343-55, 1993; Mol Gen Genet 250: |
| | 750-60, 1996 |
| barley DOF | Mena et al, The Plant Journal, 116(1): 53-62, 1998 |
| blz2 | EP99106056.7 |
| synthetic promoter | Vicente-Carbajosa et al., Plant J. 13: 629-640, 1998. |
| rice prolamin | Wu et al, Plant Cell Physiology 39(8) 885-889, 1998 |
| NRP33 | |
| rice a-globulin | Wu et al, Plant Cell Physiology 39(8) 885-889, 1998 |
| Glb-1 | |
| rice OSH1 | Sato et al, Proc. Natl. Acad. Sci. USA, 93: |
| | 8117-8122, 1996 |
| rice α-globulin | Nakase et al. Plant Mol. Biol. 33: 513-522, 1997 |
| REB/OHP-1 | |
| rice ADP-glucose | Trans Res 6: 157-68, 1997 |
| pyrophosphorylase | |
| maize ESR gene | Plant J 12: 235-46, 1997 |
| family | |
| sorghum α-kafirin | DeRose et al., Plant Mol. Biol 32: 1029-35, 1996 |
| KNOX | Postma-Haarsma et al, Plant Mol. Biol. 39: |
| | 257-71, 1999 |
| rice oleosin | Wu et al, J. Biochem. 123: 386, 1998 |
| sunflower oleosin | Cummins et al., Plant Mol. Biol. 19: 873-876, 1992 |
| PRO0117, putative | WO 2004/070039 |
| rice 40S | |
| ribosomal protein | |
| PRO0136, rice | unpublished |
| alanine | |
| aminotransferase | |
| PRO0147, trypsin | unpublished |
| inhibitor | |
| ITR1 (barley) | |
| PRO0151, rice | WO 2004/070039 |
| WSI18 | |
| PRO0175, rice | WO 2004/070039 |
| RAB21 | |
| PRO005 | WO 2004/070039 |
| PRO0095 | WO 2004/070039 |
| α-amylase | Lanahan et al, Plant Cell 4: 203-211, 1992; |
| (Amy32b) | Skriver et al, Proc Natl Acad Sci USA 88: |
| | 7266-7270, 1991 |
| cathepsin β-like | Cejudo et al, Plant Mol Biol 20: 849-856, 1992 |
| gene | |
| Barley Ltp2 | Kalla et al., Plant J. 6: 849-60, 1994 |
| Chi26 | Leah et al., Plant J. 4: 579-89, 1994 |
| Maize B-Peru | Selinger et al., Genetics 149; 1125-38, 1998 |

TABLE 2d
examples of endosperm-specific promoters

| Gene source | Reference |
|---|---|
| glutelin (rice) | Takaiwa et al. (1986) Mol Gen Genet 208: 15-22; |
| | Takaiwa et al. (1987) FEBS Letts. 221: 43-47 |
| zein | Matzke et al., (1990) Plant Mol Biol 14(3): 323-32 |
| wheat LMW and | Colot et al. (1989) Mol Gen Genet 216: 81-90, |
| HMW glutenin-1 | Anderson et al. (1989) NAR 17: 461-2 |
| wheat SPA | Albani et al. (1997) Plant Cell 9: 171-184 |
| wheat gliadins | Rafalski et al. (1984) EMBO 3: 1409-15 |
| barley Itr1 | Diaz et al. (1995) Mol Gen Genet 248(5): 592-8 |
| promoter | |
| barley B1, C, D, | Cho et al. (1999) Theor Appl Genet 98: 1253-62; |
| hordein | Muller et al. (1993) Plant J 4: 343-55; |
| | Sorenson et al. (1996) Mol Gen Genet 250: 750-60 |
| barley DOF | Mena et al, (1998) Plant J 116(1): 53-62 |
| blz2 | Onate et al. (1999) J Biol Chem 274(14): 9175-82 |
| synthetic promoter | Vicente-Carbajosa et al. (1998) Plant J 13: 629-640 |
| rice prolamin | Wu et al, (1998) Plant Cell Physiol 39(8) 885-889 |
| NRP33 | |
| rice globulin Glb-1 | Wu et al. (1998) Plant Cell Physiol 39(8) 885-889 |
| rice globulin REB/ | Nakase et al. (1997) Plant Molec Biol 33: 513-522 |
| OHP-1 | |
| rice ADP-glucose | Russell et al. (1997) Trans Res 6: 157-68 |
| pyrophosphorylase | |
| maize ESR gene | Opsahl-Ferstad et al. (1997) Plant J 12: 235-46 |
| family | |
| sorghum kafirin | DeRose et al. (1996) Plant Mol Biol 32: 1029-35 |

TABLE 2e
Examples of embryo specific promoters:

| Gene source | Reference |
|---|---|
| rice OSH1 | Sato et al, Proc. Natl. Acad. Sci. USA, |
| | 93: 8117-8122, 1996 |
| KNOX | Postma-Haarsma et al, Plant Mol. |
| | Biol. 39: 257-71, 1999 |
| PRO0151 | WO 2004/070039 |
| PRO0175 | WO 2004/070039 |
| PRO005 | WO 2004/070039 |
| PRO0095 | WO 2004/070039 |

TABLE 2f
Examples of aleurone-specific promoters:

| Gene source | Reference |
|---|---|
| α-amylase (Amy32b) | Lanahan et al, Plant Cell 4: 203-211, 1992; |
| | Skriver et al, Proc Natl Acad Sci USA 88: |
| | 7266-7270, 1991 |
| cathepsin β-like gene | Cejudo et al, Plant Mol Biol 20: 849-856, 1992 |
| Barley Ltp2 | Kalla et al., Plant J. 6: 849-60, 1994 |
| Chi26 | Leah et al., Plant J. 4: 579-89, 1994 |
| Maize B-Peru | Selinger et al., Genetics 149; 1125-38, 1998 |

[0069] A green tissue-specific promoter as defined herein is a promoter that is transcriptionally active predominantly in green tissue, substantially to the exclusion of any other parts of a plant, whilst still allowing for any leaky expression in these other plant parts.

[0070] Examples of green tissue-specific promoters which may be used to perform the methods of the invention are shown in Table 2g below.

TABLE 2g
Examples of green tissue-specific promoters

| Gene | Expression | Reference |
|---|---|---|
| Maize Orthophosphate dikinase | Leaf specific | Fukavama et al., 2001 |
| Maize Phosphoenolpyruvate | Leaf specific | Kausch et al., 2001 |
| carboxylase | | |
| Rice Phosphoenolpyruvate | Leaf specific | Liu et al., 2003 |
| carboxylase | | |
| Rice small subunit Rubisco | Leaf specific | Nomura et al., 2000 |
| rice beta expansin EXBP9 | Shoot specific | WO 2004/070039 |
| Pigeonpea small subunit Rubisco | Leaf specific | Panguluri et al., 2005 |
| Pea RBCS3A | Leaf specific | |

[0071] Another example of a tissue-specific promoter is a meristem-specific promoter, which is transcriptionally active predominantly in meristematic tissue, substantially to the exclusion of any other parts of a plant, whilst still allowing for any leaky expression in these other plant parts. Examples of green meristem-specific promoters which may be used to perform the methods of the invention are shown in Table 2h below.

TABLE 2h
Examples of meristem-specific promoters

| Gene source | Expression pattern | Reference |
|---|---|---|
| rice OSH1 | Shoot apical meristem, | Sato et al. (1996) |
| | from embryo globular stage | Proc. Natl. Acad. |
| | to seedling stage | Sci. USA, |
| | | 93: 8117-8122 |
| Rice metallothionein | Meristem specific | BAD87835.1 |
| WAK1 & WAK 2 | Shoot and root apical | Wagner & Kohorn |
| | meristems, and in | (2001) Plant Cell |
| | expanding leaves and | 13(2): 303-318 |
| | sepals | |

### Terminator

[0072] The term “terminator” encompasses a control sequence which is a DNA sequence at the end of a transcriptional unit which signals 3′ processing and polyadenylation of a primary transcript and termination of transcription. The terminator can be derived from the natural gene, from a variety of other plant genes, or from T-DNA. The terminator to be added may be derived from, for example, the nopaline synthase or octopine synthase genes, or alternatively from another plant gene, or less preferably from any other eukaryotic gene.

### Selectable Marker (Gene)/Reporter Gene

[0073] “Selectable marker”, “selectable marker gene” or “reporter gene” includes any gene that confers a phenotype on a cell in which it is expressed to facilitate the identification and/or selection of cells that are transfected or transformed with a nucleic acid construct of the invention. These marker genes enable the identification of a successful transfer of the nucleic acid molecules via a series of different principles. Suitable markers may be selected from markers that confer antibiotic or herbicide resistance, that introduce a new metabolic trait or that allow visual selection. Examples of selectable marker genes include genes conferring resistance to antibiotics (such as nptII that phosphorylates neomycin and kanamycin, or hpt, phosphorylating hygromycin, or genes conferring resistance to, for example, bleomycin, streptomycin, tetracyclin, chloramphenicol, ampicillin, gentamycin, geneticin (G418), spectinomycin or blasticidin), to herbicides (for example bar which provides resistance to Basta®; aroA or gox providing resistance against glyphosate, or the genes conferring resistance to, for example, imidazolinone, phosphinothricin or sulfonylurea), or genes that provide a metabolic trait (such as manA that allows plants to use mannose as sole carbon source or xylose isomerase for the utilisation of xylose, or antinutritive markers such as the resistance to 2-deoxyglucose). Expression of visual marker genes results in the formation of colour (for example β-glucuronidase, GUS or 3-galactosidase with its coloured substrates, for example X-Gal), luminescence (such as the luciferin/luceferase system) or fluorescence (Green Fluorescent Protein, GFP, and derivatives thereof). This list represents only a small number of possible markers. The skilled worker is familiar with such markers. Different markers are preferred, depending on the organism and the selection method.

[0074] It is known that upon stable or transient integration of nucleic acids into plant cells, only a minority of the cells takes up the foreign DNA and, if desired, integrates it into its genome, depending on the expression vector used and the transfection technique used. To identify and select these integrants, a gene coding for a selectable marker (such as the ones described above) is usually introduced into the host cells together with the gene of interest. These markers can for example be used in mutants in which these genes are not functional by, for example, deletion by conventional methods. Furthermore, nucleic acid molecules encoding a selectable marker can be introduced into a host cell on the same vector that comprises the sequence encoding the polypeptides of the invention or used in the methods of the invention, or else in a separate vector. Cells which have been stably transfected with the introduced nucleic acid can be identified for example by selection (for example, cells which have integrated the selectable marker survive whereas the other cells die).

[0075] Since the marker genes, particularly genes for resistance to antibiotics and herbicides, are no longer required or are undesired in the transgenic host cell once the nucleic acids have been introduced successfully, the process according to the invention for introducing the nucleic acids advantageously employs techniques which enable the removal or excision of these marker genes. One such a method is what is known as co-transformation. The co-transformation method employs two vectors simultaneously for the transformation, one vector bearing the nucleic acid according to the invention and a second bearing the marker gene(s). A large proportion of transformants receives or, in the case of plants, comprises (up to 40% or more of the transformants), both vectors. In case of transformation with Agrobacteria, the transformants usually receive only a part of the vector, i.e. the sequence flanked by the T-DNA, which usually represents the expression cassette. The marker genes can subsequently be removed from the transformed plant by performing crosses. In another method, marker genes integrated into a transposon are used for the transformation together with desired nucleic acid (known as the Ac/Ds technology). The transformants can be crossed with a transposase source or the transformants are transformed with a nucleic acid construct conferring expression of a transposase, transiently or stable. In some cases (approx. 10%), the transposon jumps out of the genome of the host cell once transformation has taken place successfully and is lost. In a further number of cases, the transposon jumps to a different location. In these cases the marker gene must be eliminated by performing crosses. In microbiology, techniques were developed which make possible, or facilitate, the detection of such events. A further advantageous method relies on what is known as recombination systems; whose advantage is that elimination by crossing can be dispensed with. The best-known system of this type is what is known as the Cre/lox system. Cre1 is a recombinase that removes the sequences located between the loxP sequences. If the marker gene is integrated between the loxP sequences, it is removed once transformation has taken place successfully, by expression of the recombinase. Further recombination systems are the HIN/HIX, FLP/FRT and REP/STB system (Tribble et al., J. Biol. Chem., 275, 2000: 22255-22267; Velmurugan et al., J. Cell Biol., 149, 2000: 553-566). A site-specific integration into the plant genome of the nucleic acid sequences according to the invention is possible. Naturally, these methods can also be applied to microorganisms such as yeast, fungi or bacteria.

### Transgenic/Transgene/Recombinant

[0076] For the purposes of the invention, “transgenic”, “transgene” or “recombinant” means with regard to, for example, a nucleic acid sequence, an expression cassette, gene construct or a vector comprising the nucleic acid sequence or an organism transformed with the nucleic acid sequences, expression cassettes or vectors according to the invention, all those constructions brought about by recombinant methods in which either
[0077] (a) the nucleic acid sequences encoding proteins useful in the methods of the invention, or
[0078] (b) genetic control sequence(s) which is operably linked with the nucleic acid sequence according to the invention, for example a promoter, or
[0079] (c) a) and b)
   are not located in their natural genetic environment or have been modified by recombinant methods, it being possible for the modification to take the form of, for example, a substitution, addition, deletion, inversion or insertion of one or more nucleotide residues. The natural genetic environment is understood as meaning the natural genomic or chromosomal locus in the original plant or the presence in a genomic library. In the case of a genomic library, the natural genetic environment of the nucleic acid sequence is preferably retained, at least in part. The environment flanks the nucleic acid sequence at least on one side and has a sequence length of at least 50 bp, preferably at least 500 bp, especially preferably at least 1000 bp, most preferably at least 5000 bp. A naturally occurring expression cassette—for example the naturally occurring combination of the natural promoter of the nucleic acid sequences with the corresponding nucleic acid sequence encoding a polypeptide useful in the methods of the present invention, as defined above—becomes a transgenic expression cassette when this expression cassette is modified by non-natural, synthetic (“artificial”) methods such as, for example, mutagenic treatment. Suitable methods are described, for example, in U.S. Pat. No. 5,565,350 or WO 00/15815.

[0080] A transgenic plant for the purposes of the invention is thus understood as meaning, as above, that the nucleic acids used in the method of the invention are not at their natural locus in the genome of said plant, it being possible for the nucleic acids to be expressed homologously or heterologously. However, as mentioned, transgenic also means that, while the nucleic acids according to the invention or used in the inventive method are at their natural position in the genome of a plant, the sequence has been modified with regard to the natural sequence, and/or that the regulatory sequences of the natural sequences have been modified. Transgenic is preferably understood as meaning the expression of the nucleic acids according to the invention at an unnatural locus in the genome, i.e. homologous or, preferably, heterologous expression of the nucleic acids takes place. Preferred transgenic plants are mentioned herein.

### Modulation

[0081] The term “modulation” means in relation to expression or gene expression, a process in which the expression level is changed by said gene expression in comparison to the control plant, the expression level may be increased or decreased. The original, unmodulated expression may be of any kind of expression of a structural RNA (rRNA, tRNA) or mRNA with subsequent translation. The term “modulating the activity” shall mean any change of the expression of the inventive nucleic acid sequences or encoded proteins, which leads to increased yield and/or increased growth of the plants.

### Expression

[0082] The term “expression” or “gene expression” means the transcription of a specific gene or specific genes or specific genetic construct. The term “expression” or “gene expression” in particular means the transcription of a gene or genes or genetic construct into structural RNA (rRNA, tRNA) or mRNA with or without subsequent translation of the latter into a protein. The process includes transcription of DNA and processing of the resulting mRNA product.

### Increased Expression/Overexpression

[0083] The term “increased expression” or “overexpression” as used herein means any form of expression that is additional to the original wild-type expression level.

[0084] Methods for increasing expression of genes or gene products are well documented in the art and include, for example, overexpression driven by appropriate promoters, the use of transcription enhancers or translation enhancers. Isolated nucleic acids which serve as promoter or enhancer elements may be introduced in an appropriate position (typically upstream) of a non-heterologous form of a polynucleotide so as to upregulate expression of a nucleic acid encoding the polypeptide of interest. For example, endogenous promoters may be altered in vivo by mutation, deletion, and/or substitution (see, Kmiec, U.S. Pat. No. 5,565,350; Zarling et al., WO9322443), or isolated promoters may be introduced into a plant cell in the proper orientation and distance from a gene of the present invention so as to control the expression of the gene.

[0085] If polypeptide expression is desired, it is generally desirable to include a polyadenylation region at the 3′-end of a polynucleotide coding region. The polyadenylation region can be derived from the natural gene, from a variety of other plant genes, or from T-DNA. The 3′ end sequence to be added may be derived from, for example, the nopaline synthase or octopine synthase genes, or alternatively from another plant gene, or less preferably from any other eukaryotic gene.

[0086] An intron sequence may also be added to the 5′ untranslated region (UTR) or the coding sequence of the partial coding sequence to increase the amount of the mature message that accumulates in the cytosol. Inclusion of a spliceable intron in the transcription unit in both plant and animal expression constructs has been shown to increase gene expression at both the mRNA and protein levels up to 1000-fold (Buchman and Berg (1988) Mol. Cell biol. 8: 4395-4405; Callis et al. (1987) Genes Dev 1:1183-1200). Such intron enhancement of gene expression is typically greatest when placed near the 5′ end of the transcription unit. Use of the maize introns Adh1-S intron 1, 2, and 6, the Bronze-1 intron are known in the art. For general information see: The Maize Handbook, Chapter 116, Freeling and Walbot, Eds., Springer, N.Y. (1994).

### Decreased Expression

[0087] Reference herein to “decreased expression” or “reduction or substantial elimination” of expression is taken to mean a decrease in endogenous gene expression and/or polypeptide levels and/or polypeptide activity relative to control plants. The reduction or substantial elimination is in increasing order of preference at least 10%, 20%, 30%, 40% or 50%, 60%, 70%, 80%, 85%, 90%, or 95%, 96%, 97%, 98%, 99% or more reduced compared to that of control plants.

[0088] For the reduction or substantial elimination of expression an endogenous gene in a plant, a sufficient length of substantially contiguous nucleotides of a nucleic acid sequence is required. In order to perform gene silencing, this may be as little as 20, 19, 18, 17, 16, 15, 14, 13, 12, 11, 10 or fewer nucleotides, alternatively this may be as much as the entire gene (including the 5′ and/or 3′ UTR, either in part or in whole). The stretch of substantially contiguous nucleotides may be derived from the nucleic acid encoding the protein of interest (target gene), or from any nucleic acid capable of encoding an orthologue, paralogue or homologue of the protein of interest. Preferably, the stretch of substantially contiguous nucleotides is capable of forming hydrogen bonds with the target gene (either sense or antisense strand), more preferably, the stretch of substantially contiguous nucleotides has, in increasing order of preference, 50%, 60%, 70%, 80%, 85%, 90%, 95%, 96%, 97%, 98%, 99%, 100% sequence identity to the target gene (either sense or antisense strand). A nucleic acid sequence encoding a (functional) polypeptide is not a requirement for the various methods discussed herein for the reduction or substantial elimination of expression of an endogenous gene.

[0089] This reduction or substantial elimination of expression may be achieved using routine tools and techniques. A preferred method for the reduction or substantial elimination of endogenous gene expression is by introducing and expressing in a plant a genetic construct into which the nucleic acid (in this case a stretch of substantially contiguous nucleotides derived from the gene of interest, or from any nucleic acid capable of encoding an orthologue, paralogue or homologue of any one of the protein of interest) is cloned as an inverted repeat (in part or completely), separated by a spacer (non-coding DNA).

[0090] In such a preferred method, expression of the endogenous gene is reduced or substantially eliminated through RNA-mediated silencing using an inverted repeat of a nucleic acid or a part thereof (in this case a stretch of substantially contiguous nucleotides derived from the gene of interest, or from any nucleic acid capable of encoding an orthologue, paralogue or homologue of the protein of interest), preferably capable of forming a hairpin structure. The inverted repeat is cloned in an expression vector comprising control sequences. A non-coding DNA nucleic acid sequence (a spacer, for example a matrix attachment region fragment (MAR), an intron, a polylinker, etc.) is located between the two inverted nucleic acids forming the inverted repeat. After transcription of the inverted repeat, a chimeric RNA with a self-complementary structure is formed (partial or complete). This double-stranded RNA structure is referred to as the hairpin RNA (hpRNA). The hpRNA is processed by the plant into siRNAs that are incorporated into an RNA-induced silencing complex (RISC). The RISC further cleaves the mRNA transcripts, thereby substantially reducing the number of mRNA transcripts to be translated into polypeptides. For further general details see for example, Grierson et al. (1998) WO 98/53083; Waterhouse et al. (1999) WO 99/53050).

[0091] Performance of the methods of the invention does not rely on introducing and expressing in a plant a genetic construct into which the nucleic acid is cloned as an inverted repeat, but any one or more of several well-known “gene silencing” methods may be used to achieve the same effects.

[0092] One such method for the reduction of endogenous gene expression is RNA-mediated silencing of gene expression (downregulation). Silencing in this case is triggered in a plant by a double stranded RNA sequence (dsRNA) that is substantially similar to the target endogenous gene. This dsRNA is further processed by the plant into about 20 to about 26 nucleotides called short interfering RNAs (siRNAs). The siRNAs are incorporated into an RNA-induced silencing complex (RISC) that cleaves the mRNA transcript of the endogenous target gene, thereby substantially reducing the number of mRNA transcripts to be translated into a polypeptide. Preferably, the double stranded RNA sequence corresponds to a target gene.

[0093] Another example of an RNA silencing method involves the introduction of nucleic acid sequences or parts thereof (in this case a stretch of substantially contiguous nucleotides derived from the gene of interest, or from any nucleic acid capable of encoding an orthologue, paralogue or homologue of the protein of interest) in a sense orientation into a plant. “Sense orientation” refers to a DNA sequence that is homologous to an mRNA transcript thereof. Introduced into a plant would therefore be at least one copy of the nucleic acid sequence. The additional nucleic acid sequence will reduce expression of the endogenous gene, giving rise to a phenomenon known as co-suppression. The reduction of gene expression will be more pronounced if several additional copies of a nucleic acid sequence are introduced into the plant, as there is a positive correlation between high transcript levels and the triggering of co-suppression.

[0094] Another example of an RNA silencing method involves the use of antisense nucleic acid sequences. An “antisense” nucleic acid sequence comprises a nucleotide sequence that is complementary to a “sense” nucleic acid sequence encoding a protein, i.e. complementary to the coding strand of a double-stranded cDNA molecule or complementary to an mRNA transcript sequence. The antisense nucleic acid sequence is preferably complementary to the endogenous gene to be silenced. The complementarity may be located in the “coding region” and/or in the “non-coding region” of a gene. The term “coding region” refers to a region of the nucleotide sequence comprising codons that are translated into amino acid residues. The term “non-coding region” refers to 5′ and 3′ sequences that flank the coding region that are transcribed but not translated into amino acids (also referred to as 5′ and 3′ untranslated regions).

[0095] Antisense nucleic acid sequences can be designed according to the rules of Watson and Crick base pairing. The antisense nucleic acid sequence may be complementary to the entire nucleic acid sequence (in this case a stretch of substantially contiguous nucleotides derived from the gene of interest, or from any nucleic acid capable of encoding an orthologue, paralogue or homologue of the protein of interest), but may also be an oligonucleotide that is antisense to only a part of the nucleic acid sequence (including the mRNA 5′ and 3′ UTR). For example, the antisense oligonucleotide sequence may be complementary to the region surrounding the translation start site of an mRNA transcript encoding a polypeptide. The length of a suitable antisense oligonucleotide sequence is known in the art and may start from about 50, 45, 40, 35, 30, 25, 20, 15 or 10 nucleotides in length or less. An antisense nucleic acid sequence according to the invention may be constructed using chemical synthesis and enzymatic ligation reactions using methods known in the art. For example, an antisense nucleic acid sequence (e.g., an antisense oligonucleotide sequence) may be chemically synthesized using naturally occurring nucleotides or variously modified nucleotides designed to increase the biological stability of the molecules or to increase the physical stability of the duplex formed between the antisense and sense nucleic acid sequences, e.g., phosphorothioate derivatives and acridine substituted nucleotides may be used. Examples of modified nucleotides that may be used to generate the antisense nucleic acid sequences are well known in the art.

[0096] Known nucleotide modifications include methylation, cyclization and ‘caps’ and substitution of one or more of the naturally occurring nucleotides with an analogue such as inosine. Other modifications of nucleotides are well known in the art.

[0097] The antisense nucleic acid sequence can be produced biologically using an expression vector into which a nucleic acid sequence has been subcloned in an antisense orientation (i.e., RNA transcribed from the inserted nucleic acid will be of an antisense orientation to a target nucleic acid of interest). Preferably, production of antisense nucleic acid sequences in plants occurs by means of a stably integrated nucleic acid construct comprising a promoter, an operably linked antisense oligonucleotide, and a terminator.

[0098] The nucleic acid molecules used for silencing in the methods of the invention (whether introduced into a plant or generated in situ) hybridize with or bind to mRNA transcripts and/or genomic DNA encoding a polypeptide to thereby inhibit expression of the protein, e.g., by inhibiting transcription and/or translation. The hybridization can be by conventional nucleotide complementarity to form a stable duplex, or, for example, in the case of an antisense nucleic acid sequence which binds to DNA duplexes, through specific interactions in the major groove of the double helix. Antisense nucleic acid sequences may be introduced into a plant by transformation or direct injection at a specific tissue site. Alternatively, antisense nucleic acid sequences can be modified to target selected cells and then administered systemically. For example, for systemic administration, antisense nucleic acid sequences can be modified such that they specifically bind to receptors or antigens expressed on a selected cell surface, e.g., by linking the antisense nucleic acid sequence to peptides or antibodies which bind to cell surface receptors or antigens. The antisense nucleic acid sequences can also be delivered to cells using the vectors described herein.

[0099] According to a further aspect, the antisense nucleic acid sequence is an a-anomeric nucleic acid sequence. An a-anomeric nucleic acid sequence forms specific double-stranded hybrids with complementary RNA in which, contrary to the usual b-units, the strands run parallel to each other (Gaultier et al. (1987) Nucl Ac Res 15: 6625-6641). The antisense nucleic acid sequence may also comprise a 2′-o-methylribonucleotide (Inoue et al. (1987) Nucl Ac Res 15, 6131-6148) or a chimeric RNA-DNA analogue (Inoue et al. (1987) FEBS Lett. 215, 327-330).

[0100] The reduction or substantial elimination of endogenous gene expression may also be performed using ribozymes. Ribozymes are catalytic RNA molecules with ribonuclease activity that are capable of cleaving a single-stranded nucleic acid sequence, such as an mRNA, to which they have a complementary region. Thus, ribozymes (e.g., hammerhead ribozymes (described in Haselhoff and Gerlach (1988) Nature 334, 585-591) can be used to catalytically cleave mRNA transcripts encoding a polypeptide, thereby substantially reducing the number of mRNA transcripts to be translated into a polypeptide. A ribozyme having specificity for a nucleic acid sequence can be designed (see for example: Cech et al. U.S. Pat. No. 4,987,071; and Cech et al. U.S. Pat. No. 5,116,742). Alternatively, mRNA transcripts corresponding to a nucleic acid sequence can be used to select a catalytic RNA having a specific ribonuclease activity from a pool of RNA molecules (Bartel and Szostak (1993) Science 261, 1411-1418). The use of ribozymes for gene silencing in plants is known in the art (e.g., Atkins et al. (1994) WO 94/00012; Lenne et al. (1995) WO 95/03404; Lutziger et al. (2000) WO 00/00619; Prinsen et al. (1997) WO 97/13865 and Scott et al. (1997) WO 97/38116).

[0101] Gene silencing may also be achieved by insertion mutagenesis (for example, T-DNA insertion or transposon insertion) or by strategies as described by, among others, Angell and Baulcombe ((1999) Plant J 20(3): 357-62), (Amplicon VIGS WO 98/36083), or Baulcombe (WO 99/15682).

[0102] Gene silencing may also occur if there is a mutation on an endogenous gene and/or a mutation on an isolated gene/nucleic acid subsequently introduced into a plant. The reduction or substantial elimination may be caused by a non-functional polypeptide. For example, the polypeptide may bind to various interacting proteins; one or more mutation(s) and/or truncation(s) may therefore provide for a polypeptide that is still able to bind interacting proteins (such as receptor proteins) but that cannot exhibit its normal function (such as signalling ligand).

[0103] A further approach to gene silencing is by targeting nucleic acid sequences complementary to the regulatory region of the gene (e.g., the promoter and/or enhancers) to form triple helical structures that prevent transcription of the gene in target cells. See Helene, C., Anticancer Drug Res. 6, 569-84, 1991; Helene et al., Ann. N.Y. Acad. Sci. 660, 27-36 1992; and Maher, L. J. Bioassays 14, 807-15, 1992.

[0104] Other methods, such as the use of antibodies directed to an endogenous polypeptide for inhibiting its function in planta, or interference in the signalling pathway in which a polypeptide is involved, will be well known to the skilled man. In particular, it can be envisaged that manmade molecules may be useful for inhibiting the biological function of a target polypeptide, or for interfering with the signalling pathway in which the target polypeptide is involved.

[0105] Alternatively, a screening program may be set up to identify in a plant population natural variants of a gene, which variants encode polypeptides with reduced activity. Such natural variants may also be used for example, to perform homologous recombination.

[0106] Artificial and/or natural microRNAs (miRNAs) may be used to knock out gene expression and/or mRNA translation. Endogenous miRNAs are single stranded small RNAs of typically 19-24 nucleotides long. They function primarily to regulate gene expression and/or mRNA translation. Most plant microRNAs (miRNAs) have perfect or near-perfect complementarity with their target sequences. However, there are natural targets with up to five mismatches. They are processed from longer non-coding RNAs with characteristic fold-back structures by double-strand specific RNases of the Dicer family. Upon processing, they are incorporated in the RNA-induced silencing complex (RISC) by binding to its main component, an Argonaute protein. mRNAs serve as the specificity components of RISC, since they base-pair to target nucleic acids, mostly mRNAs, in the cytoplasm. Subsequent regulatory events include target mRNA cleavage and destruction and/or translational inhibition. Effects of miRNA overexpression are thus often reflected in decreased mRNA levels of target genes.

[0107] Artificial microRNAs (amiRNAs), which are typically 21 nucleotides in length, can be genetically engineered specifically to negatively regulate gene expression of single or multiple genes of interest. Determinants of plant microRNA target selection are well known in the art. Empirical parameters for target recognition have been defined and can be used to aid in the design of specific amiRNAs, (Schwab et al., Dev. Cell 8, 517-527, 2005). Convenient tools for design and generation of amiRNAs and their precursors are also available to the public (Schwab et al., Plant Cell 18, 1121-1133, 2006).

[0108] For optimal performance, the gene silencing techniques used for reducing expression in a plant of an endogenous gene requires the use of nucleic acid sequences from monocotyledonous plants for transformation of monocotyledonous plants, and from dicotyledonous plants for transformation of dicotyledonous plants. Preferably, a nucleic acid sequence from any given plant species is introduced into that same species. For example, a nucleic acid sequence from rice is transformed into a rice plant. However, it is not an absolute requirement that the nucleic acid sequence to be introduced originates from the same plant species as the plant in which it will be introduced. It is sufficient that there is substantial homology between the endogenous target gene and the nucleic acid to be introduced.

[0109] Described above are examples of various methods for the reduction or substantial elimination of expression in a plant of an endogenous gene. A person skilled in the art would readily be able to adapt the aforementioned methods for silencing so as to achieve reduction of expression of an endogenous gene in a whole plant or in parts thereof through the use of an appropriate promoter, for example.

### Transformation

[0110] The term “introduction” or “transformation” as referred to herein encompasses the transfer of an exogenous polynucleotide into a host cell, irrespective of the method used for transfer. Plant tissue capable of subsequent clonal propagation, whether by organogenesis or embryogenesis, may be transformed with a genetic construct of the present invention and a whole plant regenerated there from. The particular tissue chosen will vary depending on the clonal propagation systems available for, and best suited to, the particular species being transformed. Exemplary tissue targets include leaf disks, pollen, embryos, cotyledons, hypocotyls, megagametophytes, callus tissue, existing meristematic tissue (e.g., apical meristem, axillary buds, and root meristems), and induced meristem tissue (e.g., cotyledon meristem and hypocotyl meristem). The polynucleotide may be transiently or stably introduced into a host cell and may be maintained non-integrated, for example, as a plasmid. Alternatively, it may be integrated into the host genome. The resulting transformed plant cell may then be used to regenerate a transformed plant in a manner known to persons skilled in the art.

[0111] The transfer of foreign genes into the genome of a plant is called transformation. Transformation of plant species is now a fairly routine technique. Advantageously, any of several transformation methods may be used to introduce the gene of interest into a suitable ancestor cell. The methods described for the transformation and regeneration of plants from plant tissues or plant cells may be utilized for transient or for stable transformation. Transformation methods include the use of liposomes, electroporation, chemicals that increase free DNA uptake, injection of the DNA directly into the plant, particle gun bombardment, transformation using viruses or pollen and microprojection. Methods may be selected from the calcium/polyethylene glycol method for protoplasts (Krens, F. A. et al., (1982) Nature 296, 72-74; Negrutiu I et al. (1987) Plant Mol Biol 8: 363-373); electroporation of protoplasts (Shillito R. D. et al. (1985) Bio/Technol 3, 1099-1102); microinjection into plant material (Crossway A et al., (1986) Mol. Gen Genet 202: 179-185); DNA or RNA-coated particle bombardment (Klein T M et al., (1987) Nature 327: 70) infection with (non-integrative) viruses and the like. Transgenic plants, including transgenic crop plants, are preferably produced via Agrobacterium-mediated transformation. An advantageous transformation method is the transformation in planta. To this end, it is possible, for example, to allow the agrobacteria to act on plant seeds or to inoculate the plant meristem with agrobacteria. It has proved particularly expedient in accordance with the invention to allow a suspension of transformed agrobacteria to act on the intact plant or at least on the flower primordia. The plant is subsequently grown on until the seeds of the treated plant are obtained (Clough and Bent, Plant J. (1998) 16, 735-743). Methods for Agrobacterium-mediated transformation of rice include well known methods for rice transformation, such as those described in any of the following: European patent application EP 1198985 A1, Aldemita and Hodges (Planta 199: 612-617, 1996); Chan et al. (Plant Mol Biol 22 (3): 491-506, 1993), Hiei et al. (Plant J 6 (2): 271-282, 1994), which disclosures are incorporated by reference herein as if fully set forth. In the case of corn transformation, the preferred method is as described in either Ishida et al. (Nat. Biotechnol 14(6): 745-50, 1996) or Frame et al. (Plant Physiol 129(1): 13-22, 2002), which disclosures are incorporated by reference herein as if fully set forth. Said methods are further described by way of example in B. Jenes et al., Techniques for Gene Transfer, in: Transgenic Plants, Vol. 1, Engineering and Utilization, eds. S. D. Kung and R. Wu, Academic Press (1993) 128-143 and in Potrykus Annu. Rev. Plant Physiol. Plant Molec. Biol. 42 (1991) 205-225). The nucleic acids or the construct to be expressed is preferably cloned into a vector, which is suitable for transforming Agrobacterium tumefaciens, for example pBin19 (Bevan et al., Nucl. Acids Res. 12 (1984) 8711). Agrobacteria transformed by such a vector can then be used in known manner for the transformation of plants, such as plants used as a model, like Arabidopsis (Arabidopsis thaliana is within the scope of the present invention not considered as a crop plant), or crop plants such as, by way of example, tobacco plants, for example by immersing bruised leaves or chopped leaves in an agrobacterial solution and then culturing them in suitable media. The transformation of plants by means of Agrobacterium tumefaciens is described, for example, by Hofgen and Willmitzer in Nucl. Acid Res. (1988) 16, 9877 or is known inter alia from F. F. White, Vectors for Gene Transfer in Higher Plants; in Transgenic Plants, Vol. 1, Engineering and Utilization, eds. S. D. Kung and R. Wu, Academic Press, 1993, pp. 15-38.

[0112] In addition to the transformation of somatic cells, which then have to be regenerated into intact plants, it is also possible to transform the cells of plant meristems and in particular those cells which develop into gametes. In this case, the transformed gametes follow the natural plant development, giving rise to transgenic plants. Thus, for example, seeds of Arabidopsis are treated with agrobacteria and seeds are obtained from the developing plants of which a certain proportion is transformed and thus transgenic [Feldman, K A and Marks M D (1987). Mol Gen Genet 208:274-289; Feldmann K (1992). In: C Koncz, N-H Chua and J Shell, eds, Methods in Arabidopsis Research. Word Scientific, Singapore, pp. 274-289]. Alternative methods are based on the repeated removal of the inflorescences and incubation of the excision site in the center of the rosette with transformed agrobacteria, whereby transformed seeds can likewise be obtained at a later point in time (Chang (1994). Plant J. 5: 551-558; Katavic (1994). Mol Gen Genet, 245: 363-370). However, an especially effective method is the vacuum infiltration method with its modifications such as the “floral dip” method. In the case of vacuum infiltration of Arabidopsis, intact plants under reduced pressure are treated with an agrobacterial suspension [Bechthold, N (1993). C R Acad Sci Paris Life Sci, 316: 1194-1199], while in the case of the “floral dip” method the developing floral tissue is incubated briefly with a surfactant-treated agrobacterial suspension [Clough, S J and Bent A F (1998) The Plant J. 16, 735-743]. A certain proportion of transgenic seeds are harvested in both cases, and these seeds can be distinguished from non-transgenic seeds by growing under the above-described selective conditions. In addition the stable transformation of plastids is of advantages because plastids are inherited maternally is most crops reducing or eliminating the risk of transgene flow through pollen. The transformation of the chloroplast genome is generally achieved by a process which has been schematically displayed in Klaus et al., 2004 [Nature Biotechnology 22 (2), 225-229]. Briefly the sequences to be transformed are cloned together with a selectable marker gene between flanking sequences homologous to the chloroplast genome. These homologous flanking sequences direct site specific integration into the plastome. Plastidal transformation has been described for many different plant species and an overview is given in Bock (2001) Transgenic plastids in basic research and plant biotechnology. J Mol. Biol. 2001 Sep. 21; 312 (3):425-38 or Maliga, P (2003) Progress towards commercialization of plastid transformation technology. Trends Biotechnol. 21, 20-28. Further biotechnological progress has recently been reported in form of marker free plastid transformants, which can be produced by a transient co-integrated maker gene (Klaus et al., 2004, Nature Biotechnology 22(2), 225-229).

[0113] The genetically modified plant cells can be regenerated via all methods with which the skilled worker is familiar. Suitable methods can be found in the above-mentioned publications by S. D. Kung and R. Wu, Potrykus or Hofgen and Willmitzer.

[0114] Generally after transformation, plant cells or cell groupings are selected for the presence of one or more markers which are encoded by plant-expressible genes co-transferred with the gene of interest, following which the transformed material is regenerated into a whole plant. To select transformed plants, the plant material obtained in the transformation is, as a rule, subjected to selective conditions so that transformed plants can be distinguished from untransformed plants. For example, the seeds obtained in the above-described manner can be planted and, after an initial growing period, subjected to a suitable selection by spraying. A further possibility consists in growing the seeds, if appropriate after sterilization, on agar plates using a suitable selection agent so that only the transformed seeds can grow into plants. Alternatively, the transformed plants are screened for the presence of a selectable marker such as the ones described above.

[0115] Following DNA transfer and regeneration, putatively transformed plants may also be evaluated, for instance using Southern analysis, for the presence of the gene of interest, copy number and/or genomic organisation. Alternatively or additionally, expression levels of the newly introduced DNA may be monitored using Northern and/or Western analysis, both techniques being well known to persons having ordinary skill in the art.

[0116] The generated transformed plants may be propagated by a variety of means, such as by clonal propagation or classical breeding techniques. For example, a first generation (or T1) transformed plant may be selfed and homozygous second-generation (or T2) transformants selected, and the T2 plants may then further be propagated through classical breeding techniques. The generated transformed organisms may take a variety of forms. For example, they may be chimeras of transformed cells and non-transformed cells; clonal transformants (e.g., all cells transformed to contain the expression cassette); grafts of transformed and untransformed tissues (e.g., in plants, a transformed rootstock grafted to an untransformed scion).

### T-DNA Activation Tagging

[0117] T-DNA activation tagging (Hayashi et al. Science (1992) 1350-1353), involves insertion of T-DNA, usually containing a promoter (may also be a translation enhancer or an intron), in the genomic region of the gene of interest or 10 kb up- or downstream of the coding region of a gene in a configuration such that the promoter directs expression of the targeted gene. Typically, regulation of expression of the targeted gene by its natural promoter is disrupted and the gene falls under the control of the newly introduced promoter. The promoter is typically embedded in a T-DNA. This T-DNA is randomly inserted into the plant genome, for example, through Agrobacterium infection and leads to modified expression of genes near the inserted T-DNA. The resulting transgenic plants show dominant phenotypes due to modified expression of genes close to the introduced promoter.

### TILLING

[0118] The term “TILLING” is an abbreviation of “Targeted Induced Local Lesions In Genomes” and refers to a mutagenesis technology useful to generate and/or identify nucleic acids encoding proteins with modified expression and/or activity. TILLING also allows selection of plants carrying such mutant variants. These mutant variants may exhibit modified expression, either in strength or in location or in timing (if the mutations affect the promoter for example). These mutant variants may exhibit higher activity than that exhibited by the gene in its natural form. TILLING combines high-density mutagenesis with high-throughput screening methods. The steps typically followed in TILLING are: (a) EMS mutagenesis (Redei G P and Koncz C (1992) In Methods in Arabidopsis Research, Koncz C, Chua N H, Schell J, eds. Singapore, World Scientific Publishing Co, pp. 16-82; Feldmann et al., (1994) In Meyerowitz E M, Somerville C R, eds, Arabidopsis. Cold Spring Harbor Laboratory Press, Cold Spring Harbor, N.Y., pp 137-172; Lightner J and Caspar T (1998) In J Martinez-Zapater, J Salinas, eds, Methods on Molecular Biology, Vol. 82. Humana Press, Totowa, N.J., pp 91-104); (b) DNA preparation and pooling of individuals; (c) PCR amplification of a region of interest; (d) denaturation and annealing to allow formation of heteroduplexes; (e) DHPLC, where the presence of a heteroduplex in a pool is detected as an extra peak in the chromatogram; (f) identification of the mutant individual; and (g) sequencing of the mutant PCR product. Methods for TILLING are well known in the art (McCallum et al., (2000) Nat Biotechnol 18: 455-457; reviewed by Stemple (2004) Nat Rev Genet 5(2): 145-50).

### Homologous Recombination

[0119] Homologous recombination allows introduction in a genome of a selected nucleic acid at a defined selected position. Homologous recombination is a standard technology used routinely in biological sciences for lower organisms such as yeast or the moss Physcomitrella. Methods for performing homologous recombination in plants have been described not only for model plants (Offring a et al. (1990) EMBO J. 9(10): 3077-84) but also for crop plants, for example rice (Terada et al. (2002) Nat Biotech 20(10): 1030-4; lida and Terada (2004) Curr Opin Biotech 15(2): 132-8), and approaches exist that are generally applicable regardless of the target organism (Miller et al, Nature Biotechnol. 25, 778-785, 2007).

### Yield Related Traits

[0120] Yield related traits comprise one or more of yield, biomass, seed yield, early vigour, greenness index, increased growth rate, improved agronomic traits (such as improved Water Use Efficiency (WUE), Nitrogen Use Efficiency (NUE), etc.).

### Yield

[0121] The term “yield” in general means a measurable produce of economic value, typically related to a specified crop, to an area, and to a period of time. Individual plant parts directly contribute to yield based on their number, size and/or weight, or the actual yield is the yield per square meter for a crop and year, which is determined by dividing total production (includes both harvested and appraised production) by planted square meters. The term “yield” of a plant may relate to vegetative biomass (root and/or shoot biomass), to reproductive organs, and/or to propagules (such as seeds) of that plant.

[0122] Taking corn as an example, a yield increase may be manifested as one or more of the following: increase in the number of plants established per square meter, an increase in the number of ears per plant, an increase in the number of rows, number of kernels per row, kernel weight, thousand kernel weight, ear length/diameter, increase in the seed filling rate (which is the number of filled seeds divided by the total number of seeds and multiplied by 100), among others. Taking rice as an example, a yield increase may manifest itself as an increase in one or more of the following: number of plants per square meter, number of panicles per plant, panicle length, number of spikelets per panicle, number of flowers (florets) per panicle, increase in the seed filling rate (which is the number of filled seeds divided by the total number of seeds and multiplied by 100), increase in thousand kernel weight, among others. In rice, submergence tolerance may also result in increased yield.

### Early Vigour

[0123] “Early vigour” refers to active healthy well-balanced growth especially during early stages of plant growth, and may result from increased plant fitness due to, for example, the plants being better adapted to their environment (i.e. optimizing the use of energy resources and partitioning between shoot and root). Plants having early vigour also show increased seedling survival and a better establishment of the crop, which often results in highly uniform fields (with the crop growing in uniform manner, i.e. with the majority of plants reaching the various stages of development at substantially the same time), and often better and higher yield. Therefore, early vigour may be determined by measuring various factors, such as thousand kernel weight, percentage germination, percentage emergence, seedling growth, seedling height, root length, root and shoot biomass and many more.

### Increased Growth Rate

[0124] The increased growth rate may be specific to one or more parts of a plant (including seeds), or may be throughout substantially the whole plant. Plants having an increased growth rate may have a shorter life cycle. The life cycle of a plant may be taken to mean the time needed to grow from a dry mature seed up to the stage where the plant has produced dry mature seeds, similar to the starting material. This life cycle may be influenced by factors such as speed of germination, early vigour, growth rate, greenness index, flowering time and speed of seed maturation. The increase in growth rate may take place at one or more stages in the life cycle of a plant or during substantially the whole plant life cycle. Increased growth rate during the early stages in the life cycle of a plant may reflect enhanced vigour. The increase in growth rate may alter the harvest cycle of a plant allowing plants to be sown later and/or harvested sooner than would otherwise be possible (a similar effect may be obtained with earlier flowering time). If the growth rate is sufficiently increased, it may allow for the further sowing of seeds of the same plant species (for example sowing and harvesting of rice plants followed by sowing and harvesting of further rice plants all within one conventional growing period). Similarly, if the growth rate is sufficiently increased, it may allow for the further sowing of seeds of different plants species (for example the sowing and harvesting of corn plants followed by, for example, the sowing and optional harvesting of soybean, potato or any other suitable plant). Harvesting additional times from the same rootstock in the case of some crop plants may also be possible. Altering the harvest cycle of a plant may lead to an increase in annual biomass production per square meter (due to an increase in the number of times (say in a year) that any particular plant may be grown and harvested). An increase in growth rate may also allow for the cultivation of transgenic plants in a wider geographical area than their wild-type counterparts, since the territorial limitations for growing a crop are often determined by adverse environmental conditions either at the time of planting (early season) or at the time of harvesting (late season). Such adverse conditions may be avoided if the harvest cycle is shortened. The growth rate may be determined by deriving various parameters from growth curves, such parameters may be: T-Mid (the time taken for plants to reach 50% of their maximal size) and T-90 (time taken for plants to reach 90% of their maximal size), amongst others.

### Stress Resistance

[0125] An increase in yield and/or growth rate occurs whether the plant is under non-stress conditions or whether the plant is exposed to various stresses compared to control plants. Plants typically respond to exposure to stress by growing more slowly. In conditions of severe stress, the plant may even stop growing altogether. Mild stress on the other hand is defined herein as being any stress to which a plant is exposed which does not result in the plant ceasing to grow altogether without the capacity to resume growth. Mild stress in the sense of the invention leads to a reduction in the growth of the stressed plants of less than 40%, 35%, 30% or 25%, more preferably less than 20% or 15% in comparison to the control plant under non-stress conditions. Due to advances in agricultural practices (irrigation, fertilization, pesticide treatments) severe stresses are not often encountered in cultivated crop plants. As a consequence, the compromised growth induced by mild stress is often an undesirable feature for agriculture. Mild stresses are the everyday biotic and/or abiotic (environmental) stresses to which a plant is exposed. Abiotic stresses may be due to drought or excess water, anaerobic stress, salt stress, chemical toxicity, oxidative stress and hot, cold or freezing temperatures. The abiotic stress may be an osmotic stress caused by a water stress (particularly due to drought), salt stress, oxidative stress or an ionic stress. Biotic stresses are typically those stresses caused by pathogens, such as bacteria, viruses, fungi, nematodes and insects.

[0126] In particular, the methods of the present invention may be performed under non-stress conditions or under conditions of mild drought to give plants having increased yield relative to control plants. As reported in Wang et al. (Planta (2003) 218: 1-14), abiotic stress leads to a series of morphological, physiological, biochemical and molecular changes that adversely affect plant growth and productivity. Drought, salinity, extreme temperatures and oxidative stress are known to be interconnected and may induce growth and cellular damage through similar mechanisms. Rabbani et al. (Plant Physiol (2003) 133: 1755-1767) describes a particularly high degree of “cross talk” between drought stress and high-salinity stress. For example, drought and/or salinisation are manifested primarily as osmotic stress, resulting in the disruption of homeostasis and ion distribution in the cell. Oxidative stress, which frequently accompanies high or low temperature, salinity or drought stress, may cause denaturing of functional and structural proteins. As a consequence, these diverse environmental stresses often activate similar cell signalling pathways and cellular responses, such as the production of stress proteins, up-regulation of anti-oxidants, accumulation of compatible solutes and growth arrest. The term “non-stress” conditions as used herein are those environmental conditions that allow optimal growth of plants. Persons skilled in the art are aware of normal soil conditions and climatic conditions for a given location. Plants with optimal growth conditions, (grown under non-stress conditions) typically yield in increasing order of preference at least 97%, 95%, 92%, 90%, 87%, 85%, 83%, 80%, 77% or 75% of the average production of such plant in a given environment. Average production may be calculated on harvest and/or season basis. Persons skilled in the art are aware of average yield productions of a crop.

[0127] Nutrient deficiency may result from a lack of nutrients such as nitrogen, phosphates and other phosphorous-containing compounds, potassium, calcium, magnesium, manganese, iron and boron, amongst others.

[0128] The term salt stress is not restricted to common salt (NaCl), but may be any one or more of: NaCl, KCl, LiCl, MgCl2, CaCl₂, amongst others.

### Increase/Improve/Enhance

[0129] The terms “increase”, “improve” or “enhance” are interchangeable and shall mean in the sense of the application at least a 3%, 4%, 5%, 6%, 7%, 8%, 8%, 9% or 10%, preferably at least 15% or 20%, more preferably 25%, 30%, 35% or 40% more yield and/or growth in comparison to control plants as defined herein.

### Seed Yield

[0130] Increased seed yield may manifest itself as one or more of the following: a) an increase in seed biomass (total seed weight) which may be on an individual seed basis and/or per plant and/or per square meter; b) increased number of flowers per plant; c) increased number of (filled) seeds; d) increased seed filling rate (which is expressed as the ratio between the number of filled seeds divided by the total number of seeds); e) increased harvest index, which is expressed as a ratio of the yield of harvestable parts, such as seeds, divided by the total biomass; and f) increased thousand kernel weight (TKW), which is extrapolated from the number of filled seeds counted and their total weight. An increased TKW may result from an increased seed size and/or seed weight, and may also result from an increase in embryo and/or endosperm size.

[0131] An increase in seed yield may also be manifested as an increase in seed size and/or seed volume. Furthermore, an increase in seed yield may also manifest itself as an increase in seed area and/or seed length and/or seed width and/or seed perimeter. Increased yield may also result in modified architecture, or may occur because of modified architecture.

### Greenness Index

[0132] The “greenness index” as used herein is calculated from digital images of plants. For each pixel belonging to the plant object on the image, the ratio of the green value versus the red value (in the RGB model for encoding colour) is calculated. The greenness index is expressed as the percentage of pixels for which the green-to-red ratio exceeds a given threshold. Under normal growth conditions, under salt stress growth conditions, and under reduced nutrient availability growth conditions, the greenness index of plants is measured in the last imaging before flowering. In contrast, under drought stress growth conditions, the greenness index of plants is measured in the first imaging after drought.

### Marker Assisted Breeding

[0133] Such breeding programmes sometimes require introduction of allelic variation by mutagenic treatment of the plants, using for example EMS mutagenesis; alternatively, the programme may start with a collection of allelic variants of so called “natural” origin caused unintentionally. Identification of allelic variants then takes place, for example, by PCR. This is followed by a step for selection of superior allelic variants of the sequence in question and which give increased yield. Selection is typically carried out by monitoring growth performance of plants containing different allelic variants of the sequence in question. Growth performance may be monitored in a greenhouse or in the field. Further optional steps include crossing plants in which the superior allelic variant was identified with another plant. This could be used, for example, to make a combination of interesting phenotypic features.

[0134] Use as Probes in (Gene Mapping)

[0135] Use of nucleic acids encoding the protein of interest for genetically and physically mapping the genes requires only a nucleic acid sequence of at least 15 nucleotides in length. These nucleic acids may be used as restriction fragment length polymorphism (RFLP) markers. Southern blots (Sambrook J, Fritsch E F and Maniatis T (1989) Molecular Cloning, A Laboratory Manual) of restriction-digested plant genomic DNA may be probed with the nucleic acids encoding the protein of interest. The resulting banding patterns may then be subjected to genetic analyses using computer programs such as MapMaker (Lander et al. (1987) Genomics 1: 174-181) in order to construct a genetic map. In addition, the nucleic acids may be used to probe Southern blots containing restriction endonuclease-treated genomic DNAs of a set of individuals representing parent and progeny of a defined genetic cross. Segregation of the DNA polymorphisms is noted and used to calculate the position of the nucleic acid encoding the protein of interest in the genetic map previously obtained using this population (Botstein et al. (1980) Am. J. Hum. Genet. 32:314-331).

[0136] The production and use of plant gene-derived probes for use in genetic mapping is described in Bernatzky and Tanksley (1986) Plant Mol. Biol. Reporter 4: 37-41. Numerous publications describe genetic mapping of specific cDNA clones using the methodology outlined above or variations thereof. For example, F2 intercross populations, backcross populations, randomly mated populations, near isogenic lines, and other sets of individuals may be used for mapping. Such methodologies are well known to those skilled in the art.

[0137] The nucleic acid probes may also be used for physical mapping (i.e., placement of sequences on physical maps; see Hoheisel et al. In: Non-mammalian Genomic Analysis: A Practical Guide, Academic press 1996, pp. 319-346, and references cited therein).

[0138] In another embodiment, the nucleic acid probes may be used in direct fluorescence in situ hybridisation (FISH) mapping (Trask (1991) Trends Genet. 7:149-154). Although current methods of FISH mapping favour use of large clones (several kb to several hundred kb; see Laan et al. (1995) Genome Res. 5:13-20), improvements in sensitivity may allow performance of FISH mapping using shorter probes.

[0139] A variety of nucleic acid amplification-based methods for genetic and physical mapping may be carried out using the nucleic acids. Examples include allele-specific amplification (Kazazian (1989) J. Lab. Clin. Med 11:95-96), polymorphism of PCR-amplified fragments (CAPS; Sheffield et al. (1993) Genomics 16:325-332), allele-specific ligation (Landegren et al. (1988) Science 241:1077-1080), nucleotide extension reactions (Sokolov (1990) Nucleic Acid Res. 18:3671), Radiation Hybrid Mapping (Walter et al. (1997) Nat. Genet. 7:22-28) and Happy Mapping (Dear and Cook (1989) Nucleic Acid Res. 17:6795-6807). For these methods, the sequence of a nucleic acid is used to design and produce primer pairs for use in the amplification reaction or in primer extension reactions. The design of such primers is well known to those skilled in the art. In methods employing PCR-based genetic mapping, it may be necessary to identify DNA sequence differences between the parents of the mapping cross in the region corresponding to the instant nucleic acid sequence. This, however, is generally not necessary for mapping methods.

### Plant

[0140] The term “plant” as used herein encompasses whole plants, ancestors and progeny of the plants and plant parts, including seeds, shoots, stems, leaves, roots (including tubers), flowers, and tissues and organs, wherein each of the aforementioned comprise the gene/nucleic acid of interest. The term “plant” also encompasses plant cells, suspension cultures, callus tissue, embryos, meristematic regions, gametophytes, sporophytes, pollen and microspores, again wherein each of the aforementioned comprises the gene/nucleic acid of interest.

[0141] Plants that are particularly useful in the methods of the invention include all plants which belong to the superfamily Viridiplantae, in particular monocotyledonous and dicotyledonous plants including fodder or forage legumes, ornamental plants, food crops, trees or shrubs selected from the list comprising Acer spp., Actinidia spp., Abelmoschus spp., Agave sisalana, Agropyron spp., Agrostis stolonifera, Allium spp., Amaranthus spp., Ammophila arenaria, Ananas comosus, Annona spp., Apium graveolens, Arachis spp, Artocarpus spp., Asparagus officinalis, Avena spp. (e.g. Avena sativa, Avena fatua, Avena byzantina, Avena fatua var. sativa, Avena hybrida), Averrhoa carambola, Bambusa sp., Benincasa hispida, Bertholletia excelsea, Beta vulgaris, Brassica spp. (e.g. Brassica napus, Brassica rapa ssp. [canola, oilseed rape, turnip rape]), Cadaba farinosa, Camellia sinensis, Canna indica, Cannabis sativa, Capsicum spp., Carex elata, Carica papaya Carissa macrocarpa, Carya spp., Carthamus tinctorius, Castanea spp., Ceiba pentandra, Cichorium endivia, Cinnamomum spp., Citrullus lanatus, Citrus spp., Cocos spp., Coffea spp., Colocasia esculenta, Cola spp., Corchorus sp., Coriandrum sativum, Corylus spp., Crataegus spp., Crocus sativus, Cucurbita spp., Cucumis spp., Cynara spp., Daucus carota, Desmodium spp., Dimocarpus longan, Dioscorea spp., Diospyros spp., Echinochloa spp., Elaeis (e.g. Elaeis guineensis, Elaeis oleifera), Eleusine coracana, Eragrostis tef, Erianthus sp., Eriobotrya japonica, Eucalyptus sp., Eugenia uniflora, Fagopyrum spp., Fagus spp., Festuca arundinacea, Ficus carica, Fortunella spp., Fragaria spp., Ginkgo biloba, Glycine spp. (e.g. Glycine max, Soja hispida or Soja max), Gossypium hirsutum, Helianthus spp. (e.g. Helianthus annuus), Hemerocallis fulva, Hibiscus spp., Hordeum spp. (e.g. Hordeum vulgare), Ipomoea batatas, Juglans spp., Lactuca sativa, Lathyrus spp., Lens culinaris, Linum usitatissimum, Litchi chinensis, Lotus spp., Luffa acutangula, Lupinus spp., Luzula sylvatica, Lycopersicon spp. (e.g. Lycopersicon esculentum, Lycopersicon lycopersicum, Lycopersicon pyriforme), Macrotyloma spp., Malus spp., Malpighia emarginata, Mammea americana, Mangifera indica, Manihot spp., Manilkara zapota, Medicago sativa, Melilotus spp., Mentha spp., Miscanthus sinensis, Momordica spp., Morus nigra, Musa spp., Nicotiana spp., Olea spp., Opuntia spp., Ornithopus spp., Oryza spp. (e.g. Oryza sativa, Oryza latifolia), Panicum miliaceum, Panicum virgatum, Passiflora edulis, Pastinaca sativa, Pennisetum sp., Persea spp., Petroselinum crispum, Phalaris arundinacea, Phaseolus spp., Phleum pratense, Phoenix spp., Phragmites australis, Physalis spp., Pinus spp., Pistacia vera, Pisum spp., Poa spp., Populus spp., Prosopis spp., Prunus spp., Psidium spp., Punica granatum, Pyrus communis, Quercus spp., Raphanus sativus, Rheum rhabarbarum, Ribes spp., Ricinus communis, Rubus spp., Saccharum spp., Salix sp., Sambucus spp., Secale cereale, Sesamum spp., Sinapis sp., Solanum spp. (e.g. Solanum tuberosum, Solanum integrifolium or Solanum lycopersicum), Sorghum bicolor, Spinacia spp., Syzygium spp., Tagetes spp., Tamarindus indica, Theobroma cacao, Trifolium spp., Tripsacum dactyloides, Triticosecale rimpaui, Triticum spp. (e.g. Triticum aestivum, Triticum durum, Triticum turgidum, Triticum hybernum, Triticum macha, Triticum sativum, Triticum monococcum or Triticum vulgare), Tropaeolum minus, Tropaeolum majus, Vaccinium spp., Vicia spp., Vigna spp., Viola odorata, Vitis spp., Zea mays, Zizania palustris, Ziziphus spp., amongst others.

### Control Plant(s)

[0142] The choice of suitable control plants is a routine part of an experimental setup and may include corresponding wild type plants or corresponding plants without the gene of interest. The control plant is typically of the same plant species or even of the same variety as the plant to be assessed. The control plant may also be a nullizygote of the plant to be assessed. Nullizygotes are individuals missing the transgene by segregation. A “control plant” as used herein refers not only to whole plants, but also to plant parts, including seeds and seed parts.

### DETAILED DESCRIPTION OF THE INVENTION

[0143] Surprisingly, it has now been found that modulating expression in a plant of a nucleic acid encoding an O-FUT polypeptide, or a By-Pass (BPS) polypeptide, or a SIZ1 polypeptide, or a bZIP-S polypeptide, or a SPA15-like polypeptide gives plants having enhanced yield-related traits relative to control plants. According to a first embodiment, the present invention provides a method for enhancing yield-related traits in plants relative to control plants, comprising modulating expression in a plant of a nucleic acid encoding an O-FUT polypeptide, or a By-Pass (BPS) polypeptide, or a SIZ1 polypeptide, or a bZIP-S polypeptide, or a SPA15-like polypeptide and optionally selecting for plants having enhanced yield-related traits.

[0144] A preferred method for modulating (preferably, increasing) expression of a nucleic acid encoding an O-FUT polypeptide, or a By-Pass (BPS) polypeptide, or a SIZ1 polypeptide, or a bZIP-S polypeptide, or a SPA15-like polypeptide is by introducing and expressing in a plant a nucleic acid encoding an O-FUT polypeptide, or a By-Pass (BPS) polypeptide, or a SIZ1 polypeptide, or a bZIP-S polypeptide, or a SPA15-like polypeptide.

[0145] Concerning O-FUT polypeptides, any reference hereinafter to a “protein useful in the methods of the invention” is taken to mean an O-FUT polypeptide as defined herein. Any reference hereinafter to a “nucleic acid useful in the methods of the invention” is taken to mean a nucleic acid capable of encoding such an O-FUT polypeptide. The nucleic acid to be introduced into a plant (and therefore useful in performing the methods of the invention) is any nucleic acid encoding the type of protein which will now be described, hereafter also named “O-FUT nucleic acid” or “O-FUT gene”.

[0146] An “O-FUT polypeptide” as defined herein refers to any polypeptide comprising a fucosyltransferase domain with an accession PFam number PF10250 or IPR019378 denomination (earlier IPR004348, DUF246 and PF03138). O-FUT polypeptides are involved in the biosynthesis of oligosaccharides, polysaccharides and glycoconjugates. O-FUT polypeptides belong to Enzyme Classification Number EC 2.4.1.221.

[0147] Preferably, a PF10250 domain has at least, in increasing order of preference, 49%, 50%, 51%, 52%, 53%, 54%, 55%, 56%, 57%, 58%, 59%, 60%, 61%, 62%, 63%, 64%, 65%, 66%, 67%, 68%, 69%, 70%, 71%, 72%, 73%, 74%, 75%, 76%, 77%, 78%, 79%, 80%, 81%, 82%, 83%, 84%, 85%, 86%, 87%, 88%, 89%, 90%, 91%, 92%, 93%, 94%, 95%, 96%, 97%, 98%, or 99% or more sequence identity to the sequence SEQ ID NO 22.

[0148] Preferably, an O-FUT polypeptide has at least, in increasing order of preference, 49%, 50%, 51%, 52%, 53%, 54%, 55%, 56%, 57%, 58%, 59%, 60%, 61%, 62%, 63%, 64%, 65%, 66%, 67%, 68%, 69%, 70%, 71%, 72%, 73%, 74%, 75%, 76%, 77%, 78%, 79%, 80%, 81%, 82%, 83%, 84%, 85%, 86%, 87%, 88%, 89%, 90%, 91%, 92%, 93%, 94%, 95%, 96%, 97%, 98%, or 99% or more sequence identity to the sequence SEQ ID NO 2.

[0149] Additionally or alternatively, the O-FUT polypeptide useful in the methods of the invention comprises one or more sequence motifs having at least, in increasing order of preference 49%, 50%, 51%, 52%, 53%, 54%, 55%, 56%, 57%, 58%, 59%, 60%, 61%, 62%, 63%, 64%, 65%, 66%, 67%, 68%, 69%, 70%, 71%, 72%, 73%, 74%, 75%, 76%, 77%, 78%, 79%, 80%, 81%, 82%, 83%, 84%, 85%, 86%, 87%, 88%, 89%, 90%, 91%, 92%, 93%, 94%, 95%, 96%, 97%, 98%, or 99% or more sequence identity to any one or more of motifs 1 to 3:

[0150] The amino acids indicated herein in square brackets represent alternative amino acids for a particular position.

| (SEQ ID NO: 261) | |
|---|---|
| Motif 1: | HYIALHLRYEKDM |
| (SEQ ID NO: 262) | |
| Motif 2: | IYIVAGEIYGGHSMD |
| (SEQ ID NO: 263) | |
| Motif 3: | ALDYNVAVQSDVFVYTYDGNMAKAVQGH |

[0151] Motifs 1 to 3 are typically found in any O-FUT polypeptide of any origin.

[0152] In a preferred embodiment of the present invention the O-FUT polypeptide of the invention may comprise a conserved Arginine residue in Motif 1.

[0153] In another preferred embodiment of the present invention, the O-FUT polypeptide of the invention comprises a conserved Arginine residue in Motif 1 and comprises in addition to Motif 1, at least Motif 2 or Motif 3 as defined above.

[0154] In a most preferably embodiment of the present invention, the O-FUT polypeptide of the invention comprises a conserved Arginine residue in Motif 1 and comprises in addition to Motif 1, Motif 2 and Motif 3 as defined above.

[0155] Motifs 1 to 3 were derived from an alignment obtained with AlignX from Vector NTI (Invitrogen).

[0156] Additionally or alternatively, the homologue of a O-FUT protein has in increasing order of preference at least 25%, 26%, 27%, 28%, 29%, 30%, 31%, 32%, 33%, 34%, 35%, 36%, 37%, 38%, 39%, 40%, 41%, 42%, 43%, 44%, 45%, 46%, 47%, 48%, 49%, 50%, 51%, 52%, 53%, 54%, 55%, 56%, 57%, 58%, 59%, 60%, 61%, 62%, 63%, 64%, 65%, 66%, 67%, 68%, 69%, 70%, 71%, 72%, 73%, 74%, 75%, 76%, 77%, 78%, 79%, 80%, 81%, 82%, 83%, 84%, 85%, 86%, 87%, 88%, 89%, 90%, 91%, 92%, 93%, 94%, 95%, 96%, 97%, 98%, or 99% overall sequence identity to the amino acid represented by SEQ ID NO: 2, provided that the homologous protein comprises any one or more of the conserved motifs as outlined above. The overall sequence identity is determined using a global alignment algorithm, such as the Needleman Wunsch algorithm in the program GAP (GCG Wisconsin Package, Accelrys), preferably with default parameters and preferably with sequences of mature proteins (i.e. without taking into account secretion signals or transit peptides). Compared to overall sequence identity, the sequence identity will generally be higher when only conserved domains or motifs are considered. Preferably the motifs in a O-FUT polypeptide have, in increasing order of preference, at least 70%, 71%, 72%, 73%, 74%, 75%, 76%, 77%, 78%, 79%, 80%, 81%, 82%, 83%, 84%, 85%, 86%, 87%, 88%, 89%, 90%, 91%, 92%, 93%, 94%, 95%, 96%, 97%, 98%, or 99% sequence identity to any one or more of the motifs represented by SEQ ID NO: 261 to SEQ ID NO: 263 (Motifs 1 to 3).

[0157] Concerning By-Pass (BPS) polypeptides, any reference hereinafter to a “protein useful in the methods of the invention” is taken to mean a BPS polypeptide as defined herein. Any reference hereinafter to a “nucleic acid useful in the methods of the invention” is taken to mean a nucleic acid capable of encoding such a BPS polypeptide. The nucleic acid to be introduced into a plant (and therefore useful in performing the methods of the invention) is any nucleic acid encoding the type of protein which will now be described, hereafter also named “BPS nucleic acid” or “BPS gene”.

[0158] A “BPS polypeptide” as defined herein refers to any plant specific polypeptide comprising a single transmembrane domain and the at least one of the following three motifs:

Motif 4:
(SEQ ID NO: 341)
SWM[KT][LQ]A[MI]ESLC[EA][TI]H[TN]DIKTLIT[DE]LELP
Motif 5:
(SEQ ID NO: 342)
D[IL]C[IN]AFSSE[LI][ST]RLNQGHL[LY]L[QK]C[AV]LHNL
[DE][SG]SS
Motif 6:
(SEQ ID NO: 343)
GKVLM[RQ]A[ML]YGV[KR]V[VQ]TV[FY][IV]CS[VI]FA[AV]
AFSGS

[0159] Preferably, the Motifs 4, 5 and 6 of a BPS polypeptide has at least, in increasing order of preference, 49%, 50%, 51%, 52%, 53%, 54%, 55%, 56%, 57%, 58%, 59%, 60%, 61%, 62%, 63%, 64%, 65%, 66%, 67%, 68%, 69%, 70%, 71%, 72%, 73%, 74%, 75%, 76%, 77%, 78%, 79%, 80%, 81%, 82%, 83%, 84%, 85%, 86%, 87%, 88%, 89%, 90%, 91%, 92%, 93%, 94%, 95%, 96%, 97%, 98%, or 99% or more sequence identity to the sequence of SEQ ID NO: 341, 342 and 343 (Motif4, Motif 5 and Motif 6).

[0160] Motifs 4, 5 and 6 correspond to a consensus sequences which represent conserved protein regions in BPS polypeptide of any plant origin.

[0161] Additionally or alternatively, the BPS polypeptide useful in the methods of the invention comprises one or more sequence motifs having at least, in increasing order of preference 49%, 50%, 51%, 52%, 53%, 54%, 55%, 56%, 57%, 58%, 59%, 60%, 61%, 62%, 63%, 64%, 65%, 66%, 67%, 68%, 69%, 70%, 71%, 72%, 73%, 74%, 75%, 76%, 77%, 78%, 79%, 80%, 81%, 82%, 83%, 84%, 85%, 86%, 87%, 88%, 89%, 90%, 91%, 92%, 93%, 94%, 95%, 96%, 97%, 98%, or 99% or more sequence identity to any one or more of motifs 7 to 9:

Motif 7:
(SEQ ID NO: 344)
SWM[KT][LQ]A[MI]ESLC[EA][TI]H[NT]D[IV]KTLIT[DE]LEL
PVSDW[DE][ED]KW[IV]DVYLD[IN]SVKL
Motif 8:
(SEQ ID NO: 345)
SL[ND]LPK[VI]KNSAKGKVLM[RQ]A[ML]YGV[KR]V[QV]TV[FY]
[IV]CSVFA[AV]AFSGS
Motif 9:
(SEQ ID NO: 346)
PQ[ED]P[HP]R[PS]F[FL]PFGNPF

[0162] Motifs 7, 8 and 9 correspond to consensus sequences which represent conserved protein regions in BPS polypeptide of Trees, Fabales, Solanales, Brassicales and Other Dicots clusters as defined in FIG. 6.

[0163] In a preferred embodiment of the present invention the BPS polypeptide of the invention may comprise Motifs 7, 8 and 9 in addition to Motif 4, Motif 5 and Motif 6 as defined above, or may comprise a motif having, in increasing order of preference at least 49%, 50%, 51%, 52%, 53%, 54%, 55%, 56%, 57%, 58%, 59%, 60%, 61%, 62%, 63%, 64%, 65%, 66%, 67%, 68%, 69%, 70%, 71%, 72%, 73%, 74%, 75%, 76%, 77%, 78%, 79%, 80%, 81%, 82%, 83%, 84%, 85%, 86%, 87%, 88%, 89%, 90%, 91%, 92%, 93%, 94%, 95%, 96%, 97%, 98%, or 99% or more sequence identity to any one or more of Motifs 10 to 12:

Motif 10:
(SEQ ID NO: 347)
[VM]PK[EDN]K[SDN][DQ]ILT[LV]SWM[KS][QL]AM[EA]SLC
[EQ]TH[KN][NAS]I[KNR]TL[IV]TDL[EQ]LPVSD[WL]E[ED]
[KN][WF][VI][DY][IV]Y
Motif 11:
(SEQ ID NO: 348)
LPK[VK]KNSAKGKVL[ML]RA[LF]YGVKV[KQ]T[LV]YI[CS][SG]
VF[AT]AA[FW]S[GD]S[ST][NQK][ND]L[FL][YD][LV][TP]
[VI][SP][NE][EK]
Motif 12:
(SEQ ID NO: 349)
[PL]WA[KQP][SVA]F[MT][DE][MLV]Q[NS][TV][VM]N[AGPS]
EI[KR][ND][IM][FL][LS]S[DG][GR][LFS]T[VI][LIM]K
[ED]LE[AS]V[DE][AS][GS]V[KE][KQ]L[YA][PT][AM][IV]
Q[DQE]G[SV]

[0164] Motifs 10, 11 and 12 correspond to consensus sequences which represent conserved protein regions in BPS polypeptide of Brassicales cluster as defined in FIG. 6.

[0165] More preferably, the BPS polypeptide comprises in increasing order of preference at least 3, at least 4, at least 5, at least 6, at least 7, at least 8 or all 9 motifs.

[0166] Motifs 4 to 12 were derived using the MEME algorithm (Bailey and Elkan, Proceedings of the Second International Conference on Intelligent Systems for Molecular Biology, pp. 28-36, AAAI Press, Menlo Park, Calif., 1994). At each position within a MEME motif, the residues are shown that are present with a frequency higher than 0.2. Residues within square brackets represent alternatives.

[0167] Additionally or alternatively, the homologue of a BPS protein has in increasing order of preference at least 25%, 26%, 27%, 28%, 29%, 30%, 31%, 32%, 33%, 34%, 35%, 36%, 37%, 38%, 39%, 40%, 41%, 42%, 43%, 44%, 45%, 46%, 47%, 48%, 49%, 50%, 51%, 52%, 53%, 54%, 55%, 56%, 57%, 58%, 59%, 60%, 61%, 62%, 63%, 64%, 65%, 66%, 67%, 68%, 69%, 70%, 71%, 72%, 73%, 74%, 75%, 76%, 77%, 78%, 79%, 80%, 81%, 82%, 83%, 84%, 85%, 86%, 87%, 88%, 89%, 90%, 91%, 92%, 93%, 94%, 95%, 96%, 97%, 98%, or 99% overall sequence identity to the amino acid represented by SEQ ID NO: 268, provided that the homologous protein comprises any one or more of the conserved motifs as outlined above. The overall sequence identity is determined using a global alignment algorithm, such as the Needleman Wunsch algorithm in the program GAP (GCG Wisconsin Package, Accelrys), preferably with default parameters and preferably with sequences of mature proteins (i.e. without taking into account secretion signals or transit peptides). Compared to overall sequence identity, the sequence identity will generally be higher when only conserved domains or motifs are considered. Preferably the motifs in a BPS polypeptide have, in increasing order of preference, at least 70%, 71%, 72%, 73%, 74%, 75%, 76%, 77%, 78%, 79%, 80%, 81%, 82%, 83%, 84%, 85%, 86%, 87%, 88%, 89%, 90%, 91%, 92%, 93%, 94%, 95%, 96%, 97%, 98%, or 99% sequence identity to any one or more of the motifs represented by SEQ ID NO: 341 to SEQ ID NO: 349 (Motifs 4 to 12).

[0168] Concerning SIZ1 polypeptides, any reference hereinafter to a “protein useful in the methods of the invention” is taken to mean a SIZ1 polypeptide as defined herein. Any reference hereinafter to a “nucleic acid useful in the methods of the invention” is taken to mean a nucleic acid capable of encoding such a SIZ1 polypeptide. The nucleic acid to be introduced into a plant (and therefore useful in performing the methods of the invention) is any nucleic acid encoding the type of protein which will now be described, hereafter also named “SIZ1 nucleic acid” or “SIZ1 gene”.

[0169] A “SIZ1 polypeptide” as defined herein refers to any small ubiquitin-like modifier (SUMO) E3 ligase comprising at least one of the three following domains with PFam accession numbers: a “SAP” binding-DNA domain—PF02037; a “PHD Zn finger domain” domain PF00628 and a “MIZ SP/RING Zn finger” domain—PF02891, respectively with an average length of 34, 54 and 49 amino acids.

[0170] Preferably, the “SAP” domain of a SIZ1 polypeptide has at least, in increasing order of preference, 49%, 50%, 51%, 52%, 53%, 54%, 55%, 56%, 57%, 58%, 59%, 60%, 61%, 62%, 63%, 64%, 65%, 66%, 67%, 68%, 69%, 70%, 71%, 72%, 73%, 74%, 75%, 76%, 77%, 78%, 79%, 80%, 81%, 82%, 83%, 84%, 85%, 86%, 87%, 88%, 89%, 90%, 91%, 92%, 93%, 94%, 95%, 96%, 97%, 98%, or 99% or more sequence identity to the sequence located between amino acid 11 and 45 of SEQ ID NO 354.

[0171] Preferably, the “PHD Zn finger domain” of a SIZ1 polypeptide has at least, in increasing order of preference, 49%, 50%, 51%, 52%, 53%, 54%, 55%, 56%, 57%, 58%, 59%, 60%, 61%, 62%, 63%, 64%, 65%, 66%, 67%, 68%, 69%, 70%, 71%, 72%, 73%, 74%, 75%, 76%, 77%, 78%, 79%, 80%, 81%, 82%, 83%, 84%, 85%, 86%, 87%, 88%, 89%, 90%, 91%, 92%, 93%, 94%, 95%, 96%, 97%, 98%, or 99% or more sequence identity to the sequence located between amino acid 114 and 148 of SEQ ID NO 354.

[0172] Preferably, the “MIZ SP/RING Zn finger” domain of a SIZ1 polypeptide has at least, in increasing order of preference, 49%, 50%, 51%, 52%, 53%, 54%, 55%, 56%, 57%, 58%, 59%, 60%, 61%, 62%, 63%, 64%, 65%, 66%, 67%, 68%, 69%, 70%, 71%, 72%, 73%, 74%, 75%, 76%, 77%, 78%, 79%, 80%, 81%, 82%, 83%, 84%, 85%, 86%, 87%, 88%, 89%, 90%, 91%, 92%, 93%, 94%, 95%, 96%, 97%, 98%, or 99% or more sequence identity to the sequence located between amino acid 359 and 408 of SEQ ID NO 354.

[0173] Additionally or alternatively, the SIZ1 polypeptide useful in the methods of the invention comprises one or more sequence motifs having at least, in increasing order of preference 49%, 50%, 51%, 52%, 53%, 54%, 55%, 56%, 57%, 58%, 59%, 80%, 81%, 62%, 63%, 64%, 65%, 66%, 67%, 68%, 69%, 70%, 71%, 72%, 73%, 74%, 75%, 76%, 77%, 78%, 79%, 80%, 81%, 82%, 83%, 84%, 85%, 86%, 87%, 88%, 89%, 90%, 91%, 92%, 93%, 94%, 95%, 96%, 97%, 98%, or 99% or more sequence identity to any one or more of motifs 13 to 15:

| (SEQ ID NO: 412) | |
|---|---|
| Motif 13: | FYCEICRLTRADPF |
| (SEQ ID NO: 413) | |
| Motif 14: | FCFGVRLVKRR |
| (SEQ ID NO: 414) | |
| Motif 15: | SDIEVVADFFGVNLRCPMSG |

[0174] Motifs 13 to 15 are typically found in any SIZ1 polypeptide of any origin.

[0175] In another preferred embodiment of the present invention the SIZ1 polypeptide of the invention may comprise Motifs 16, 17 and 18 in addition to Motif 13, Motif 14 and Motif 15 as defined above, or may comprise a motif having, in increasing order of preference at least 49%, 50%, 51%, 52%, 53%, 54%, 55%, 56%, 57%, 58%, 59%, 60%, 61%, 62%, 63%, 64%, 65%, 66%, 67%, 68%, 69%, 70%, 71%, 72%, 73%, 74%, 75%, 76%, 77%, 78%, 79%, 80%, 81%, 82%, 83%, 84%, 85%, 86%, 87%, 88%, 89%, 90%, 91%, 92%, 93%, 94%, 95%, 96%, 97%, 98%, or 99% or more sequence identity to any one or more of Motifs 16 to 18:

| (SEQ ID NO: 415) | |
|---|---|
| Motif 16: | RKWQCPICLKN |
| (SEQ ID NO: 416) | |
| Motif 17: | VIVLSDSDDEND |
| (SEQ ID NO: 417) | |
| Motif 18: | PSLQIFLP |

[0176] Motifs 16, 17 and 18 correspond to a consensus sequences which represent conserved protein regions in an SIZ1 polypeptide of II class origin, to which O. sativa and H. vulgare and A. thaliana belong.

[0177] The motifs were designed with MEME algorithm (Bailey and Elkan, Proceedings of the Second International Conference on Intelligent Systems for Molecular Biology, pp. 28-36, AAAI Press, Menlo Park, Calif., 1994.)

[0178] Additionally or alternatively, the homologue of a SIZ1 protein has in increasing order of preference at least 25%, 26%, 27%, 28%, 29%, 30%, 31%, 32%, 33%, 34%, 35%, 36%, 37%, 38%, 39%, 40′, 41%, 42%, 43%, 44%, 45%, 46%, 47%, 48%, 49, 50%, 51%, 52%, 53%, 54%, 55%, 56%, 57%, 58%, 59%, 60%, 61%, 62%, 63%, 64%, 65%, 66%, 67%, 68%, 69%, 70%, 71%, 72%, 73%, 74%, 75%, 76%, 77%, 78%, 79%, 80%, 81%, 82%, 83%, 84%, 85%, 86%, 87%, 88%, 89%, 90%, 91%, 92%, 93%, 94%, 95%, 96%, 97%, 98%, or 99% overall sequence identity to the amino acid represented by SEQ ID NO: 354, provided that the homologous protein comprises any one or more of the conserved motifs as outlined above. The overall sequence identity is determined using a global alignment algorithm, such as the Needleman Wunsch algorithm in the program GAP (GCG Wisconsin Package, Accelrys), preferably with default parameters and preferably with sequences of mature proteins (i.e. without taking into account secretion signals or transit peptides). Compared to overall sequence identity, the sequence identity will generally be higher when only conserved domains or motifs are considered. Preferably the motifs in a SIZ1 polypeptide have, in increasing order of preference, at least 70%, 71%, 72%, 73%, 74%, 75%, 76%, 77%, 78%, 79%, 80%, 81%, 82%, 83%, 84%, 85%, 86%, 87%, 88%, 89%, 90%, 91%, 92%, 93%, 94%, 95%, 96%, 97%, 98%, or 99% sequence identity to any one or more of the motifs represented by SEQ ID NO: 409 to SEQ ID NO: 414 (Motifs 13 to 18).

[0179] Concerning bZIP-S polypeptides, any reference hereinafter to a “protein useful in the methods of the invention” is taken to mean a bZIP-S polypeptide as defined herein. Any reference hereinafter to a “nucleic acid useful in the methods of the invention” is taken to mean a nucleic acid capable of encoding such a bZIP-S polypeptide. The nucleic acid to be introduced into a plant (and therefore useful in performing the methods of the invention) is any nucleic acid encoding the type of protein which will now be described, hereafter also named “bZIP-S nucleic acid” or “bZIP-S gene”.

[0180] A “bZIP-S polypeptide” as defined herein refers to any transcription factor (TF) of the basic leucine zipper (bZIP) family comprising a Basic Leucine Zipper domain (bZIP domain, Pfam accession number PF0170 and InterPro entry IPR011616) and one or more of motifs 19 to 21 as described below.

[0181] A bZIP-S TF is characterized by a long conserved domain (bZIP domain) typically having 40- to 80-amino-acids that is composed of two regions: a basic region involved in the binding of the TF to its target DNA, and a leucine zipper required for multimerization, typically dimerisation of the bZIP-S. A preferred bZIP polypeptide of the invention comprises a bZIP domain (bZIP domain, Pfam accession number PF0170 and InterPro entry IPR011616) having in increasing order of preference at least 50%, 51%, 52%, 53%, 54%, 55%, 56%, 57%, 58%, 59%, 60%, 61%, 62%, 63%, 64%, 65%, 66%, 67%, 68%, 69%, 70%, 71%, 72%, 73%, 74%, 75%, 76%, 77%, 78%, 79%, 80%, 81%, 82%, 83%, 84%, 85%, 86%, 87%, 88%, 89%, 90%, 91%, 92%, 93%, 94%, 95%, 96%, 97%, 98%, 99% or 100% sequence identity to the sequence of any of the bZIP domains of the polypeptides of Table A4, preferably of the domain located between amino acids 28 and 89 of SEQ ID NO: 422 (bZIP domain in SEQ ID NO: 422). Methods to determine the presence of a bZIP domain in a polypeptide are well known in the art. The Examples section herein gives further details on such methods.

[0182] Further preferred, the bZIP domain in the bZIP-S polypeptide useful in the methods of the invention comprises a basic region having in increasing order of preference at least 50%, 51%, 52%, 53%, 54%, 55%, 56%, 57%, 58%, 59%, 60%, 61%, 62%, 63%, 64%, 65%, 66%, 67%, 68%, 69%, 70%, 71%, 72%, 73%, 74%, 75%, 76%, 77%, 78%, 79%, 80%, 81%, 82%, 83%, 84%, 85%, 86%, 87%, 88%, 89%, 90%, 91%, 92%, 93%, 94%, 95%, 96%, 97%, 98%, 99% or 100% sequence identity to the to the sequence located between amino acids 33 and 43 of SEQ ID NO: 422 (Basic region of the bZIP domain in SEQ ID NO: 422 having SMART accession number SM00036).

[0183] In addition or alternatively the bZIP polypeptide useful in the invention has a sequence which when used in the construction of a phylogenetic tree of bZIP transcription factors such as those of Arabidopsis, black cottonwood and rice described on FIG. 3 of Guedes Correa et al. PLoS ONE, 2008, Volume 3, Issue 8, e2944), herein incorporated by reference, clusters with the bZIPs of group S, preferably of group SE2, most preferably with any one of AtbZIP2 (AT2g18160), AtbZIP11 (At4g34590) and AtbZIP14 (At1g75390) rather than with any other group or bZIP TF. Methods to perform phylogenetic analysis and draw a phylogenetic tree are well known in the art, as for examples described herein or in Guedes Correa et al. 2008.

[0184] The bZIP polypeptide useful in the invention comprises one or more of the following conserved motifs:

Motif 19: a protein motif having in increasing order of preference at least 50%, 51%, 52%, 53%, 54%, 55%, 56%, 57%, 58%, 59%, 60%, 61%, 62%, 63%, 64%, 65%, 66%, 67%, 68%, 69%, 70%, 71%, 72%, 73%, 74%, 75%, 76%, 77%, 78%, 79%, 80%, 81%, 82%, 83%, 84%, 85%, 86%, 87%, 88%, 89%, 90%, 91%, 92%, 93%, 94%, 95%, 96%, 97%, 98%, 99% or 100% sequence identity to any motif selected from Table 3a, preferably to SEQ ID NO: 522 (KQKHLDDLAVQLSQLRNENQQILTSVNLTTQ);
Motif 20: a protein motif having in increasing order of preference at least 50%, 51%, 52%, 53%, 54%, 55%, 56%, 57%, 58%, 59%, 60%, 61%, 62%, 63%, 64%, 65%, 66%, 67%, 68%, 69%, 70%, 71%, 72%, 73%, 74%, 75%, 76%, 77%, 78%, 79%, 80%, 81%, 82%, 83%, 84%, 85%, 86%, 87%, 88%, 89%, 90%, 91%, 92%, 93%, 94%, 95%, 96%, 97%, 98%, 99% or 100% sequence identity to any motif selected from Table 3b, preferably to SEQ ID NO: 557 (VEAENSVLRAQMGELSNRLESLNEIV);
Motif 21: a protein motif having in increasing order of preference at least 50%, 51%, 52%, 53%, 54%, 55%, 56%, 57%, 58%, 59%, 60%, 61%, 62%, 63%, 64%, 65%, 66%, 67%, 68%, 69%, 70%, 71%, 72%, 73%, 74%, 75%, 76%, 77%, 78%, 79%, 80%, 81%, 82%, 83%, 84%, 85%, 86%, 87%, 88%, 89%, 90%, 91%, 92%, 93%, 94%, 95%, 96%, 97%, 98%, 99% or 100% sequence identity to any motif selected from Table 3c, preferably to SEQ ID NO: 600 (KRMISNRESARRSRM);

[0185] Alternative Motifs 19 to 21 may be defined as follows:

Motif 19: a protein motif having in increasing order of preference at least 15, 16, 17, 18, 19, 20, 21, 22, 23, 24, 25, 26, 27, 28, 29, 30, 31, 32, 33 amino acid residues identical to any of the motifs of Table 3a, preferably to the motif represented by SEQ ID NO: 522 (KQKHLDDLAVQLSQLRNENQQILTSVNLTTQ), preferably the motif has sequence sharing at least 15, 16, 17, 18, 19, 20, 21, 22, 23, 24, 25, 26, 27, 28, 29, 30, 31, 32, 33 amino acids in common with the sequence of any of the motifs of Table 3a;
Motif 20: a protein motif having in increasing order of preference at least 13, 14, 15, 16, 17, 18, 19, 20, 21, 22, 23, 24, 25, 26 amino acid residues identical to any of the motifs of Table 3b, preferably to the motif represented by SEQ ID NO: 557 (VEAENSVLRAQMGELSNRLE SLNEIV), preferably the motif has sequence sharing at least 15, 16, 17, 18, 19, 20, 21, 22, 23, 24, 25, 26 amino acids in common with the sequence of any of the motifs of Table 3b;
Motif 21: a protein motif having in increasing order of preference at least 8, 9, 10, 11, 12, 13, 14, 15 amino acid residues identical to any of the motifs of Table 3c, preferably to the motif represented by SEQ ID NO: 600 (KRMISNRESARRSRM);

[0186] Examples of Motifs 19 to 21 are given in Tables 3a to 3c herein.

TABLE 3a
Motif 20 as present in the polypeptides of Table A4.

| | Amino acid coordinate | Amino acid | |
|---|---|---|---|
| Polypeptide Name as in Table A4 | at Start | coordinate at end | Sequence |
| Populus_trichocarpa_EF14 | 49 | 80 | KQKHLDDLVAQVAQLKKENHQIITSINITTQ |
| Nicotiana_tabacum_AY0455 | 50 | 81 | KQKHLDDLMAQVATLRKENNQILTSMNVTTQ |
| P. trichocarpa_818112#1 | 49 | 80 | KQKHLDDLMAQVSQLRKENHQIITGINITTQ |
| G. max_GM06MC32426_sk55g0 | 49 | 80 | KQKHLDDLVSQVAQLRKENQQILTSVNITTQ |
| Glycine_max_AF532621#1 | 51 | 82 | KQKHLDDLVSQVAQLRKENQQILTSVNITTQ |
| P. trichocarpa_715285#1 | 50 | 81 | KQKHLDDLMAQVTQLRKDNNQILTTINVTTQ |
| Capsicum_chinense_AF1277 | 49 | 80 | KQKHLDDLMAQVSTLRKENDQILTSMNVTTQ |
| Capsicum_chinense_AF4303 | 49 | 80 | KQKHLDDLMAQVSTLRKENDQILTSMNVTTQ |
| V. vinifera_GSVIVT0003633 | 49 | 80 | KQKHLDDLMAQAAQLRKENSQIITSMNVTTQ |
| Medicago_truncatula_BT05 | 49 | 80 | KQKHLDDLVSQVSKLRKENQEILTSVNITTQ |
| Mt_bZIP | 49 | 80 | KQKHLDDLVSQVSKLRKENQEILTSVNITTQ |
| A. thaliana_AT1G75390.1#1 | 60 | 91 | KQKHLDDLTAQVTHLRKENAQIVAGIAVTTQ |
| Arabidopsis_thaliana_BT0 | 54 | 85 | KQKHLDDLTAQVTHLRKENAQIVAGIAVTTQ |
| Solanum_lycopersicum_FJ6 | 49 | 80 | KQKHLDDLMSQVTNLRKENNQILTSMNVTTQ |
| Capsicum_annuum_AY789639 | 49 | 80 | KQKHLNDLMAQVSTLRKENDQILTSMNVTTQ |
| Arabidopsis_thaliana_AF0 | 46 | 77 | KQKLLDDLTAQVNHLKKENTEIVTSVSITTQ |
| Arabidopsis_thaliana_AT4 | 46 | 77 | KQKLLDDLTAQVNHLKKENTEIVTSVSITTQ |
| G. max_GM06MC17143_596542 | 52 | 83 | KQKHLDDLASQVTQLRNENHQILTSVNLTTQ |
| V. vinifera_GSVIVT0001455 | 39 | 70 | KQKHLDDLMAQVAQLRKENNEILSSINITNQ |
| B. napus_BN06MC17829_4559 | 46 | 77 | KQKLLDDLTAQVNQLRKENSEIVTSVSITTQ |
| Oryza_sativa_Japonica_Gr | 56 | 87 | KQRHLDDLTAQVAHLRRENAHVATALGLTTQ |
| Mt_bZIP2 | 49 | 80 | KQKHLDDLAVQLSQLRNENQQILTSVNLTTQ |
| V. vinifera_GSVIVT0003689 | 49 | 80 | KQKHLDDMMAQMVHLRKENNRILTTMNVTTQ |
| P. trichocarpa_710131#1 | 48 | 79 | KQKYLGDLMAQVAQLRTDNNQILTTINVTTQ |
| Petroselinum_crispum_AJ2 | 47 | 78 | KQNHLDELMAQAAQLRKENNQIITTTNLTTQ |
| S. bicolor_Sb04g002700.1# | 56 | 87 | KQRHLDELTAQAAHLRRENAHVATALGLTTQ |
| B. napus_BN06MC15489_4421 | 35 | 66 | KQKLLDDLTAQVNRLKEQNNEILTSVSITTQ |
| B. napus_BN06MC23287_4905 | 47 | 78 | KQKHLDDLTAQIAHFLEENSHIVAGISVTTQ |
| Zea_mays_BT067356#1 | 56 | 87 | KQRHLDELTAQAAHLRRENAHVATALGLTAQ |
| Z. mays_ZM07MC37862_BFb03 | 56 | 87 | KQRHLDELTAQAAHLRRENAHVATALGLTAQ |
| Zea_mays_BT018074#1 | 55 | 86 | KQRHLDELTAQAAHLRRENAHVATALGLTAQ |
| Zea_mays_EU976771#1 | 56 | 87 | KQRHLDELTAQAAHLRRENAHVATALGLTAQ |
| T. erecta_SIN_01b-CS_Scar | 45 | 76 | KQKHLDDLMTQLSQLKKENNEIMAHVSITMQ |
| P. trichocarpa_719591#1 | 50 | 81 | KQKHLDDLMGQLGQLSKENNEILKRMNVTSQ |
| Arabidopsis_thaliana_AT2 | 50 | 81 | KQKHVDDLTAQINQLSNDNRQILNSLTVTSQ |
| H. vulgare_c62949710hv270 | 57 | 88 | KQRHLDDLAAQAAHLRRENAHVAAALGLTAR |
| G. max_GM06MC32046_sj86f0 | 43 | 74 | KQKHLDDLASQLTQLRSQNQQLLTSVNLTSH |
| Arabidopsis_thaliana_AF0 | 50 | 81 | KQEHVDDLTAQINQLSNDNRQILNSLTVTSQ |
| S. bicolor_Sb07g015450.1# | 58 | 89 | KQQHLDDLNLQVDKLRTTKQQLMTALNITTQ |
| G. max_GM06MC33749_sm67c0 | 54 | 85 | KRNHLDQLTKQLSQLAKNNGEILATIDITTQ |
| G. max_GM06MC01804_489153 | 51 | 82 | KQQHLEGLSAQLDQLKKENTQMNTNIGISTQ |
| Tamarix_hispida_FJ752700 | 40 | 71 | KQQHLGDLLNQVSKLQAENSQFVAKINSASQ |

TABLE 3b
Motif 20 as present in the polypeptides of Table A4.

| | Amino acid coordinate | Amino acid coordinate | |
|---|---|---|---|
| Polypeptide Name as in Table A4 | at Start | at end | Sequence |
| B. napus_BN06MC17829_4559 | 81 | 107 | VEAENSVLRAQLDELSHRLESLNDII |
| Nicotiana_tabacum_AY0455 | 85 | 111 | VEAENSILRAQLAELNHRLESLNEII |
| Capsicum_annuum_AY789639 | 84 | 110 | VEAENSILRAQLSELSHRLESLNEII |
| Capsicum_chinense_AF1277 | 84 | 110 | VEAENSILRAQLSELSHRLESLNEII |
| Capsicum_chinense_AF4303 | 84 | 110 | VEAENSILRAQLSELSHRLESLNEII |
| G. max_GM06MC32426_sk55g0 | 84 | 110 | VEAENSVLRAQVGELSHRLESLNEIV |
| Glycine_max_AF532621#1 | 86 | 112 | VEAENSVLRAQVGELSHRLESLNEIV |
| Arabidopsis_thaliana_AF0 | 81 | 107 | VEAENSVLRAQLDELNHRLQSLNDII |
| Arabidopsis_thaliana_AT4 | 81 | 107 | VEAENSVLRAQLDELNHRLQSLNDII |
| G. max_GM06MC17143_596542 | 87 | 113 | VEAENSVLRAQVNELSHWLESLNEII |
| P. trichocarpa_719591#1 | 85 | 111 | IEAENSILRAQMAELSHRLNSLNEII |
| P. trichocarpa_710131#1 | 83 | 109 | VEAENSILRAQMMELNHRLDSLNEIL |
| P. trichocarpa_715285#1 | 85 | 111 | VEAENSILRAQMMELNHRLDSLNEIL |
| G. max_GM06MC32046_sj86f0 | 78 | 104 | VEAENSVLRAQVNELSHRLDSLNQII |
| Mt_bZIP | 84 | 110 | VEAENSVLRAQMGELSNRLESLNEIV |
| G. max_GM06MC33749_sm67c0 | 89 | 115 | VEAENSILRAQMGELSQRLQSLNDIV |
| Solanum_lycopersicum_FJ6 | 84 | 110 | VEAENSILRAQLSELSRRLESLNEII |
| B. napus_BN06MC15489_4421 | 70 | 96 | VEAENSVLKAQLDELSHRLESLNGII |
| A. thaliana_AT1G75390.1#1 | 95 | 121 | IEAENDILRAQVLELNHRLQSLNEIV |
| Arabidopsis_thaliana_BT0 | 89 | 115 | IEAENDILRAQVLELNHRLQSLNEIV |
| Populus_trichocarpa_EF14 | 84 | 110 | VEADNSILRAQVSELSHRLEFLNGII |
| Petroselinum_crispum_AJ2 | 82 | 108 | VEAENSVLRAQMDELTQRLQSLNDIL |
| H. vulgare_c62949710hv270 | 92 | 118 | VDAENAVLRTQAAELAARLQSLNDII |
| V. vinifera_GSVIVT0001455 | 74 | 100 | VEADNSILRAQAMELSHRYQSLNDIL |
| P. trichocarpa_818112#1 | 84 | 110 | VEADNSILRVQISELSNRLESLNEII |
| G. max_GM06MC01804_489153 | 86 | 112 | VEAENAILRAQMEELSKRLNSLNEMI |
| S. bicolor_Sb04g002700.1# | 91 | 117 | VDAENAVLRTQAAELAARLGSLNDIL |
| Z. mays_ZM07MC37862_BFb03 | 91 | 117 | VDAENAVLRTQAAELAARLGSLNDIL |
| Mt_bZIP2 | 84 | 110 | VESENSVLRAQLNELNSRFESLNEII |
| Zea_mays_BT067356#1 | 91 | 117 | VDAENAVLRTQTAELAARLGSLNDIL |
| V. vinifera_GSVIVT0003689 | 84 | 110 | VEAENAILRAQMAELTLRLQTLNEIM |
| V. vinifera_GSVIVT0003633 | 84 | 110 | IEAENSVLRAQFSELSNRLQYLVEII |
| Zea_mays_BT018074#1 | 90 | 116 | VDADNAVLRTQAAELAARLGSLNDIL |
| Zea_mays_EU976771#1 | 91 | 117 | VDADNAVLRTQAAELAARLGSLNDIL |
| Oryza_sativa_Japonica_Gr | 91 | 117 | VDAENAVLRTQAAELAARLASLNDIL |
| B. napus_BN06MC23287_4905 | 82 | 108 | IEGENSVLRAQFLELNQRLNSLNEIV |
| Arabidopsis_thaliana_AT2 | 85 | 111 | IQAENSVLTAQMEELSTRLQSLNEIV |
| Arabidopsis_thaliana_AF0 | 85 | 111 | IQAENSVLTAQMEELSTRLQSLNEIV |
| T. erecta_SIN_01b-CS_Scar | 80 | 106 | MEAENLVLRAQVAELSHRLESLDQIK |
| S. bicolor_Sb07g015450.1# | 93 | 119 | AEAQNSVLRTQMMELESRLCALREII |
| Tamarix_hispida_FJ752700 | 75 | 101 | VESENNVLRAQLMELTDRLNSLNSLL |
| Medicago_truncatula_BT05 | 5 | 31 | SGTSSGSSLLQNSGSEEDLQALMDQR |

TABLE 3c
Motif 3 as present in the polypeptides of Table A4.

| | Amino acid coordinate | Amino acid coordinate | |
|---|---|---|---|
| Polypeptide Name as in Table A4 | at Start | at end | Sequence |
| Tamarix_hispida_FJ752700 | 24 | 39 | KRMISNRESARRSRM |
| G. max_GM06MC32046_sj86f0 | 27 | 42 | KRMISNRESARRSRM |
| Mt_bZIP2 | 33 | 48 | KRMISNRESARRSRM |
| V. vinifera_GSVIVT0003633 | 33 | 48 | KRMISNRESARRSRM |
| G. max_GM06MC32426_sk55g0 | 33 | 48 | KRMISNRESARRSRM |
| Medicago_truncatula_BT05 | 33 | 48 | KRMISNRESARRSRM |
| Populus_trichocarpa_EF14 | 33 | 48 | KRMISNRESARRSRM |
| P. trichocarpa_818112#1 | 33 | 48 | KRMISNRESARRSRM |
| Nicotiana_tabacum_AY0455 | 34 | 49 | KRMISNRESARRSRM |
| Capsicum_annuum_AY789639 | 33 | 48 | KRMISNRESARRSRM |
| Capsicum_chinense_AF1277 | 33 | 48 | KRMISNRESARRSRM |
| Capsicum_chinense_AF4303 | 33 | 48 | KRMISNRESARRSRM |
| Solanum_lycopersicum_FJ6 | 33 | 48 | KRMISNRESARRSRM |
| Glycine_max_AF532621#1 | 35 | 50 | KRMISNRESARRSRM |
| G. max_GM06MC17143_596542 | 36 | 51 | KRMISNRESARRSRM |
| Mt_bZIP | 33 | 48 | KRMISNRESARRSRM |
| V. vinifera_GSVIVT0003689 | 33 | 48 | KRMLSNRESARRSRM |
| Arabidopsis_thaliana_AF0 | 30 | 45 | KRMLSNRESARRSRM |
| Arabidopsis_thaliana_AT4 | 30 | 45 | KRMLSNRESARRSRM |
| B. napus_BN06MC15489_4421 | 19 | 34 | KRMLSNRESARRSRM |
| Arabidopsis_thaliana_AT2 | 34 | 49 | KRMLSNRESARRSRM |
| H. vulgare_c62949710hv270 | 41 | 56 | KRMLSNRESARRSRM |
| S. bicolor_Sb04g002700.1# | 40 | 55 | KRMLSNRESARRSRM |
| Zea_mays_BT067356#1 | 40 | 55 | KRMLSNRESARRSRM |
| Z. mays_ZM07MC37862_BFb03 | 40 | 55 | KRMLSNRESARRSRM |
| Zea_mays_BT018074#1 | 39 | 54 | KRMLSNRESARRSRM |
| Zea_mays_EU976771#1 | 40 | 55 | KRMLSNRESARRSRM |
| Oryza_sativa_Japonica_Gr | 40 | 55 | KRMLSNRESARRSRM |
| P. trichocarpa_710131#1 | 32 | 47 | KRMLSNRESARRSRM |
| G. max_GM06MC01804_489153 | 35 | 50 | KRMLSNRESARRSRM |
| P. trichocarpa_715285#1 | 34 | 49 | KRMQSNRESARRSRM |
| T. erecta_SIN_01b-CS_Scar | 29 | 44 | KRMVSNRESARRSRM |
| G. max_GM06MC33749_sm67c0 | 38 | 53 | KRKQSNRESARRSRM |
| A. thaliana_AT1G75390.1#1 | 44 | 59 | KRKQSNRESARRSRM |
| Arabidopsis_thaliana_BT0 | 38 | 53 | KRKQSNRESARRSRM |
| B. napus_BN06MC23287_4905 | 31 | 46 | KRKESNRESARRSRM |
| Arabidopsis_thaliana_AF0 | 34 | 49 | KRMLSNRESARRSRV |
| P. trichocarpa_719591#1 | 34 | 49 | KRMLSNRESARRSRV |
| B. napus_BN06MC17829_4559 | 30 | 45 | KRMLSNRESARRSRK |
| Petroselinum_crispum_AJ2 | 31 | 46 | KRMQSNRESARRSRQ |
| S. bicolor_Sb07g015450.1# | 42 | 57 | RRMESNRESAKRSRQ |
| V. vinifera_GSVIVT0001455 | 24 | 39 | KKKEENAIKSGIRKA |

[0187] Motifs 19 to 21 may be derived using the MEME algorithm (Bailey and Elkan, Proceedings of the Second International Conference on Intelligent Systems for Molecular Biology, pp. 28-36, AAAI Press, Menlo Park, Calif., 1994). At each position within a MEME motif, the residues are shown that are present with a frequency higher than 0.2. Residues within square brackets represent alternatives.

[0188] More preferably, the bZIP-S polypeptide useful in the methods of the invention comprises 2, preferably 3 motifs selected from motifs 19 to 21.

[0189] Additionally or alternatively, the homologue of a bZIP-S protein has in increasing order of preference at least 25%, 26%, 27%, 28%, 29%, 30%, 31%, 32%, 33%, 34%, 35%, 36%, 37%, 38%, 39%, 40%, 41%, 42%, 43%, 44%, 45%, 46%, 47%, 48%, 49%, 50%, 51%, 52%, 53%, 54%, 55%, 56%, 57%, 58%, 59%, 60%, 61%, 62%, 63%, 64%, 65%, 66%, 67%, 68%, 69%, 70%, 71%, 72%, 73%, 74%, 75%, 76%, 77%, 78%, 79%, 80%, 81%, 82%, 83%, 84%, 85%, 86%, 87%, 88%, 89%, 90%, 91%, 92%, 93%, 94%, 95%, 96%, 97%, 98%, or 99% overall sequence identity to the amino acid of any of the polypeptides of Table A4 preferably to the bZIP-S polypeptide represented by SEQ ID NO: 422, provided that the homologous protein comprises the bZIP domain and any one or more the conserved motifs as outlined above. The overall sequence identity is determined using a global alignment algorithm, such as the Needleman Wunsch algorithm in the program GAP (GCG Wisconsin Package, Accelrys), preferably with default parameters and preferably with sequences of mature proteins (i.e. without taking into account secretion signals or transit peptides). Compared to overall sequence identity, the sequence identity will generally be higher when only conserved domains or motifs are considered.

[0190] Concerning SPA 15-like polypeptides, any reference hereinafter to a “protein useful in the methods of the invention” is taken to mean a SPA15-like polypeptide as defined herein. Any reference hereinafter to a “nucleic acid useful in the methods of the invention” is taken to mean a nucleic acid capable of encoding such a SPA15-like polypeptide. The nucleic acid to be introduced into a plant (and therefore useful in performing the methods of the invention) is any nucleic acid encoding the type of protein which will now be described, hereafter also named “SPA15-like nucleic acid” or “SPA15-like gene”.

[0191] A “SPA15-like polypeptide” as defined herein refers to any polypeptide comprising an Armadillo-type fold domain with an InterPro accession number IPR016024 and SuperFamily accession number SSF48371, close to the C-terminal end, and a “winged helix” DNA-binding domain with a SuperFamily accession number SSF46785. SPA15-like polypeptides are found associated with plant leaf cell wall of various cell types and may play a significant role during leaf senescence phase.

[0192] Preferably, a winged helix” DNA-binding domain of a SPA15-like polypeptide has at least, in increasing order of preference, 49%, 50%, 51%, 52%, 53%, 54%, 55%, 56%, 57%, 58%, 59%, 60%, 61%, 62%, 63%, 64%, 65%, 66%, 67%, 68%, 69%, 70%, 71%, 72%, 73%, 74%, 75%, 76%, 77%, 78%, 79%, 80%, 81%, 82%, 83%, 84%, 85%, 86%, 87%, 88%, 89%, 90%, 91%, 92%, 93%, 94%, 95%, 96%, 97%, 98%, or 99% or more sequence identity to the sequence located between amino acid 37 and 106 of SEQ ID NO 634.

[0193] Preferably, the Armadillo-type fold domain of a SPA15-like polypeptide has at least, in increasing order of preference, 49%, 50%, 51%, 52%, 53%, 54%, 55%, 56%, 57%, 58%, 59%, 60%, 61%, 62%, 63%, 64%, 65%, 66%, 67%, 68%, 69%, 70%, 71%, 72%, 73%, 74%, 75%, 76%, 77%, 78%, 79%, 80%, 81%, 82%, 83%, 84%, 85%, 86%, 87%, 88%, 89%, 90%, 91%, 92%, 93%, 94%, 95%, 96%, 97%, 98%, or 99% or more sequence identity to the sequence located between amino acid 308 and 421 of SEQ ID NO 634.

[0194] Additionally or alternatively, the SPA15-like polypeptide useful in the methods of the invention comprises one or more sequence motifs having 1, 2, 3 or 4 mismatches that are allowed and at least, in increasing order of preference 49%, 50%, 51%, 52%, 53%, 54%, 55%, 56%, 57%, 58%, 59%, 60%, 61%, 62%, 63%, 64%, 65%, 66%, 67%, 68%, 69%, 70%, 71%, 72%, 73%, 74%, 75%, 76%, 77%, 78%, 79%, 80%, 81%, 82%, 83%, 84%, 85%, 86%, 87%, 88%, 89%, 90%, 91%, 92%, 93%, 94%, 95%, 96%, 97%, 98%, or 99% or more sequence identity to any one or more of motifs 22 to 24:

[0195] The amino acids indicated herein in square brackets represent alternative amino acids for a particular position.

(SEQ ID NO: 691)
Motif 22: AAD[KQR]HWSDGALEADLR[RL]AD[FS][RV][AV]
[KR][QR]RAMEDA[LF]MAL[EK]F[VI][KR][ND][IV]HDMM[AV]
[SN][KR][ML][YQ][KE]
(SEQ ID NO: 692)
Motif 23: RA[RC]QDVA[IV]LGS[GE]FLKLDARAR[EK]DT[EK]
KID[RHN]
(SEQ ID NO: 693)
Motif 24: L[SA]EA[DC]GIDY[TN]D[PA]E[EF][LV]

[0196] Motifs 22 to 24 are typically found in any SPA15-like polypeptide of any plant origin.

[0197] In another preferred embodiment, the SPA15-like polypeptide useful in the methods of the invention comprises one or more sequence motifs having 1, 2, 3 or 4 mismatches that are allowed and at least, in increasing order of preference 49%, 50%, 51%, 52%, 53%, 54%, 55%, 56%, 57%, 58%, 59%, 60%, 61%, 62%, 63%, 64%, 65%, 66%, 67%, 68%, 69%, 70%, 71%, 72%, 73%, 74%, 75%, 76%, 77%, 78%, 79%, 80%, 81%, 82%, 83%, 84%, 85%, 86%, 87%, 88%, 89%, 90%, 91%, 92%, 93%, 94%, 95%, 96%, 97%, 98%, or 99% or more sequence identity to any one or more of motifs 25 to 27:

(SEQ ID NO: 694)
Motif 25: EADGIDYTDPEELELLV[AT]TLIDLDAMDGK[SG]S
[VA]SLLAECSSSPDVNTR[KQ]AL
(SEQ ID NO: 695)
Motif 26: APSMW[TI]LGNAGMGALQRLA[EQ]DSN[PY]A[IV]A
[AR]A
(SEQ ID NO: 696)
Motif 27: FP[HG]EVS[TA]D[RQ]ITAI[QE][QE]AYW[SD]MA

[0198] Motifs 25, 26 and 27 correspond to consensus sequences which represent conserved protein regions in a SPA15-like polypeptides class origin, to which Ipomoea_batatas_AF234536 and H .annuus_TC31796 belong, in other words, motifs 25, 26 and 27 correspond to consensus sequences which represent conserved protein regions in SPA15-like polypeptides having sequences that would cluster within the group of SPA-like polypeptides depicted in FIG. 16.

[0199] In a most preferred embodiment, the SPA15-like polypeptide useful in the methods of the invention comprises one or more sequence motifs having 1, 2, 3 or 4 mismatches that are allowed and at least, in increasing order of preference 49%, 50%, 51%, 52%, 53%, 54%, 55%, 56%, 57%, 58%, 59%, 60%, 81%^{,} 62%, 63%, 64%, 65%, 66%, 67%, 68%, 69%, 70%, 71%, 72%, 73%, 74%, 75%, 76%, 77%, 78%, 79%, 80%, 81%, 82%, 83%, 84%, 85%, 86%, 87%, 88%, 89%, 90%, 91%, 92%, 93%, 94%, 95%, 96%, 97%, 98%, or 99% or more sequence identity to any one or more of motifs 28 to 30:

(SEQ ID NO: 697)
Motif 28: DGIDYTDPEELELLV[AT]TLIDLDAMDGK[KSR]S[VA]
SL[LI]AECSSSPDVNTRKALAN
(SEQ ID NO: 698)
Motif 29: PSMW[TI]LGNAGMGALQRLA[QE]D[SP]N[YP]A[VI]
A[RA]AA[ST]RAI[ND][EA]L[KT]KQWE[LV]EEGDSLRF
(SEQ ID NO: 699)
Motif 30: [GL][SV][ST]S[PER][AT][NG][ST][TR][SDG]
[FR]I[TS]LEKNG[NKI][TA][LF][EG][LF]FP[GH]EVS[TSA]D
[QR]I[TSY]AIE[EQ]AY[WKQ]SMASA[LF]SEA

[0200] Motifs 28, 29 and 30 correspond to a consensus sequences which represent conserved protein regions in a SPA15-like polypeptides class origin, to which Os_SPA15-like and B.napus_TC82749 belong, in other words, motifs 28, 29 and 30 correspond to consensus sequences which represent conserved protein regions in SPA15-like polypeptides having sequences that would cluster within group A of SPA-like polypeptides depicted in FIG. 16.

[0201] It is understood that Motif 22, 23, 24, 25, 26, 27, 28, 29 and 30 as referred to herein represent the consensus sequence of the motifs as present in SPA15-like polypeptides represented in Table A5, especially in SEQ ID NO: 634. However, it is to be understood that Motifs as defined herein are not limited to their respective sequence but they encompass the corresponding motifs as present in any SPA15-like polypeptide.

[0202] More preferably, the SPA15-like polypeptide useful in the methods of the invention comprises in increasing order of preference, at least 2, at least 3, at least 4, at least 5, at least 6, at least 7, at least 8 or all 9 motifs.

[0203] Motifs 22 to 30 were derived using the MEME algorithm (Bailey and Elkan, Proceedings of the Second International Conference on Intelligent Systems for Molecular Biology, pp. 28-36, AAAI Press, Menlo Park, Calif., 1994). At each position within a MEME motif, the residues are shown that are present with a frequency higher than 0.2. Residues within square brackets represent alternatives.

[0204] Additionally or alternatively, the homologue of a SPA15-like protein has in increasing order of preference at least 25%, 26%, 27%, 28%, 29%, 30%, 31%, 32%, 33%, 34%, 35%, 36%, 37%, 38%, 39%, 40%, 41%, 42%, 43%, 44%, 45%, 46%, 47%, 48%, 49%, 50%, 51%, 52%, 53%, 54%, 55%, 56%, 57%, 58%, 59%, 60%, 61%, 62%, 63%, 64%, 65%, 66%, 67%, 68%, 69%, 70%, 71%, 72%, 73%, 74%, 75%, 76%, 77%, 78%, 79%, 80%, 81%, 82%, 83%, 84%, 85%, 86%, 87%, 88%, 89%, 90%, 91%, 92%, 93%, 94%, 95%, 96%, 97%, 98%, or 99% overall sequence identity to the amino acid represented by SEQ ID NO: 634, provided that the homologous protein comprises any one or more of the conserved motifs as outlined above. The overall sequence identity is determined using a global alignment algorithm, such as the Needleman Wunsch algorithm in the program GAP (GCG Wisconsin Package, Accelrys), preferably with default parameters and preferably with sequences of mature proteins (i.e. without taking into account secretion signals or transit peptides). Compared to overall sequence identity, the sequence identity will generally be higher when only conserved domains or motifs are considered. Preferably the motifs in a SPA15-like polypeptide have, in increasing order of preference, at least 70%, 71%, 72%, 73%, 74%, 75%, 76%, 77%, 78%, 79%, 80%, 81%, 82%, 83%, 84%, 85%, 86%, 87%, 88%, 89%, 90%, 91%, 92%, 93%, 94%, 95%, 96%, 97%, 98%, or 99% sequence identity to any one or more of the motifs represented by SEQ ID NO: 691 to SEQ ID NO: 699 (Motifs 22 to 30).

[0205] The terms “domain”, “signature” and “motif” are defined in the “definitions” section herein.

[0206] Concerning O-FUT polypeptides, the polypeptide sequence which when used in the construction of a phylogenetic tree, such as the one depicted in FIG. 3, preferably clusters with the group of O-FUT polypeptides comprising the amino acid sequence represented by SEQ ID NO: 2 rather than with any other group.

[0207] Furthermore, O-FUT polypeptides (at least in their native form) typically have peptide-O-fucosyltransferase activity. Tools and techniques for measuring peptide-O-fucosyltransferase activity are well known in the art.

[0208] In addition, O-FUT polypeptides, when expressed in rice according to the methods of the present invention as outlined in the Examples Section, give plants having increased yield related traits, in particular total seed weight, fill rate, harvest index and number of filled seeds.

[0209] Concerning By-Pass (BPS) polypeptides, the polypeptide sequence which when used in the construction of a phylogenetic tree, such as the one depicted in FIG. 6, preferably clusters with the group of BPS polypeptides comprising the amino acid sequence represented by SEQ ID NO: 268 rather than with any other group.

[0210] Furthermore, BPS polypeptides (at least in their native form) seem to play a role in the regulation of the accumulation of a signal molecule, which circulates from roots to shoots. Tools and techniques for measuring its activity are well known in the art. Further details are provided in the Examples Section.

[0211] In addition, BPS polypeptides, when expressed in rice according to the methods of the present invention as outlined in the Examples Section, give plants having increased yield related traits, in particular harvest index, seeds fill rate and total seed yield per plant.

[0212] Concerning SIZ1 polypeptides, the polypeptide sequence which when used in the construction of a phylogenetic tree, such as the one depicted in FIG. 10, preferably clusters with the group of SIZ1 polypeptides comprising the amino acid sequence represented by SEQ ID NO: 354 rather than with any other group.

[0213] Furthermore, SIZ1 polypeptides (at least in their native form) typically have a SUMO E3 ligase activity. Tools and techniques for measuring ligase activity are well known in the art.

[0214] In addition, SIZ1 polypeptides, when expressed in rice according to the methods of the present invention as outlined in the Examples Section, give plants having increased yield related traits, in particular seed yield, number of filled seeds, fill rate, number of flowers per panicle, harvest index, thousand kernel weight, centre of gravity of the canopy and proportion of the thick root in the root system.

[0215] Concerning bZIP-S polypeptides, bZIP-S polypeptides, additionally, typically have DNA binding activity. Tools and techniques for measuring DNA bidning activity are well known in the art. (Izawa, T. et al. (1993), J. Mol. Biol. 230, 1131-1144; Choi, H. et al. (2000) J. Biol. Chem. 275, 1723-1730). Preferably, bZIP-S polypeptides bind to a promoter sequence (in vivo and/or in vitro) comprising the ACGT core sequence. Further preferably, a bZIP-S polypeptide bind to a DNA fragment comprising any one or more of an A-box (TACGTA), a C-box (GACGTC and a G-Box (CACGTG) as represented by SEQ ID NO: 630, SEQ ID NO: 631, SEQ ID NO: 632 respectively.

[0216] In addition, bZIP-S polypeptides, when expressed in rice according to the methods of the present invention as outlined in the Examples section, give plants having increased yield related traits, in particular increase seed yield.

[0217] Concerning SPA15-like polypeptides, the polypeptide sequence which when used in the construction of a phylogenetic tree, such as the one depicted in FIG. 16, preferably, clusters with the group of SPA15-like polypeptides comprising the amino acid sequence represented by SEQ ID NO: 634 rather than with any other group.

[0218] In addition, SPA15-like polypeptides, when expressed in rice according to the methods of the present invention as outlined in the Examples Section, give plants having increased yield related traits, in particular total seed weight, harvest index, number of filled seeds, fill rate and flower per panicle.

[0219] Concerning O-FUT polypeptides, the present invention is illustrated by transforming plants with the nucleic acid sequence represented by SEQ ID NO: 1, encoding the polypeptide sequence of SEQ ID NO: 2. However, performance of the invention is not restricted to these sequences; the methods of the invention may advantageously be performed using any O-FUT-encoding nucleic acid or O-FUT polypeptide as defined herein.

[0220] Examples of nucleic acids encoding O-FUT polypeptides are given in Table A1 of the Examples section herein. Such nucleic acids are useful in performing the methods of the invention. The amino acid sequences given in Table A1 of the Examples section are example sequences of orthologues and paralogues of the O-FUT polypeptide represented by SEQ ID NO: 2, the terms “orthologues” and “paralogues” being as defined herein. Further orthologues and paralogues may readily be identified by performing a so-called reciprocal blast search as described in the definitions section.

[0221] The invention also provides hitherto unknown O-FUT-encoding nucleic acids and O-FUT polypeptides useful for conferring enhanced yield-related traits in plants relative to control plants.

[0222] According to a further embodiment of the present invention, there is therefore provided an isolated nucleic acid molecule selected from:
[0223] (i) a nucleic acid represented by SEQ ID NO: 1;
[0224] (ii) the complement of a nucleic acid represented by SEQ ID NO: 1;
[0225] (iii) a nucleic acid encoding the polypeptide as represented by SEQ ID NO: 21, preferably as a result of the degeneracy of the genetic code, said isolated nucleic acid can be derived from a polypeptide sequence as represented by any one of SEQ ID NO: 2 and further preferably confers enhanced yield-related traits relative to control plants;
[0226] (iv) a nucleic acid having, in increasing order of preference at least 30%, 31%, 32%, 33%, 34%, 35%, 36%, 37%, 38%, 39%, 40%, 41%, 42%, 43%, 44%, 45%, 46%, 47%, 48%, 49%, 50%, 51%, 52%, 53%, 54%, 55%, 56%, 57%, 58%, 59%, 60%, 61%, 62%, 63%, 64%, 65%, 66%, 67%, 68%, 69%, 70%, 71%, 72%, 73%, 74%, 75%, 76%, 77%, 78%, 79%, 80%, 81%, 82%, 83%, 84%, 85%, 86%, 87%, 88%, 89%, 90%, 91%, 92%, 93%, 94%, 95%, 96%, 97%, 98%, or 99% sequence identity with any of the nucleic acid sequences of table A1 and further preferably conferring enhanced yield-related traits relative to control plants;
[0227] (v) a nucleic acid molecule which hybridizes with a nucleic acid molecule of (i) to (iv) under stringent hybridization conditions and preferably confers enhanced yield-related traits relative to control plants;
[0228] (vi) a nucleic acid encoding a O-FUT polypeptide having, in increasing order of preference, at least 50%, 51%, 52%, 53%, 54%, 55%, 56%, 57%, 58%, 59%, 60%, 61%, 62%, 63%, 64%, 65%, 66%, 67%, 68%, 69%, 70%, 71%, 72%, 73%, 74%, 75%, 76%, 77%, 78%, 79%, 80%, 81%, 82%, 83%, 84%, 85%, 86%, 87%, 88%, 89%, 90%, 91%, 92%, 93%, 94%, 95%, 96%, 97%, 98%, or 99% sequence identity to the amino acid sequence represented by SEQ ID NO: 2 and any of the other amino acid
[0229] (vii) sequences in Table A1 and preferably conferring enhanced yield-related traits relative to control plants.

[0230] According to a further embodiment of the present invention, there is also provided an isolated polypeptide selected from:
[0231] (i) an amino acid sequence represented by any one of SEQ ID NO: 2;
[0232] (ii) an amino acid sequence having, in increasing order of preference, at least 50%, 51%, 52%, 53%, 54%, 55%, 56%, 57%, 58%, 59%, 60%, 61%, 62%, 63%, 64%, 65%, 66%, 67%, 68%, 69%, 70%, 71%, 72%, 73%, 74%, 75%, 76%, 77%, 78%, 79%, 80%, 81%, 82%, 83%, 84%, 85%, 86%, 87%, 88%, 89%, 90%, 91%, 92%, 93%, 94%, 95%, 96%, 97%, 98%, or 99% sequence identity to the amino acid sequence represented by any one of SEQ ID NO: 2 or 22 and any of the other amino acid sequences in Table A1 and preferably conferring enhanced yield-related traits relative to control plants.
[0233] (iii) derivatives of any of the amino acid sequences given in (i) or (ii) above.

[0234] Concerning By-Pass (BPS) polypeptides, the present invention is illustrated by transforming plants with the nucleic acid sequence represented by SEQ ID NO: 267, encoding the polypeptide sequence of SEQ ID NO: 268. However, performance of the invention is not restricted to these sequences; the methods of the invention may advantageously be performed using any BPS-encoding nucleic acid or BPS polypeptide as defined herein.

[0235] Examples of nucleic acids encoding BPS polypeptides are given in Table A2 of the Examples section herein. Such nucleic acids are useful in performing the methods of the invention. The amino acid sequences given in Table A2 of the Examples section are example sequences of orthologues and paralogues of the BPS polypeptide represented by SEQ ID NO: 268, the terms “orthologues” and “paralogues” being as defined herein. Further orthologues and paralogues may readily be identified by performing a so-called reciprocal blast search as described in the definitions section.

[0236] Concerning SIZ1 polypeptides, the present invention is illustrated by transforming plants with the nucleic acid sequence represented by SEQ ID NO: 353, encoding the polypeptide sequence of SEQ ID NO: 354. However, performance of the invention is not restricted to these sequences; the methods of the invention may advantageously be performed using any SIZ1-encoding nucleic acid or SIZ1 polypeptide as defined herein.

[0237] Examples of nucleic acids encoding SIZ1 polypeptides are given in Table A3 of the Examples section herein. Such nucleic acids are useful in performing the methods of the invention. The amino acid sequences given in Table A3 of the Examples section are example sequences of orthologues and paralogues of the SIZ1 polypeptide represented by SEQ ID NO: 355, the terms “orthologues” and “paralogues” being as defined herein. Further orthologues and paralogues may readily be identified by performing a so-called reciprocal blast search as described in the definitions section; where the query sequence is SEQ ID NO: 354 or SEQ ID NO: 355, the second BLAST (back-BLAST) would be against rice sequences.

[0238] The invention also provides hitherto unknown SIZ1-encoding nucleic acids and SIZ1 polypeptides useful for conferring enhanced yield-related traits in plants relative to control plants.

[0239] Concerning bZIP-S polypeptides, the present invention is illustrated by transforming plants with the nucleic acid sequence represented by SEQ ID NO: 421, encoding the polypeptide sequence of SEQ ID NO: 422. However, performance of the invention is not restricted to these sequences; the methods of the invention may advantageously be performed using any bZIP-S-encoding nucleic acid or bZIP-S polypeptide as defined herein.

[0240] Examples of nucleic acids encoding bZIP-S polypeptides are given in Table A4 of the Examples section herein. Such nucleic acids are useful in performing the methods of the invention. The amino acid sequences given in Table A4 of the Examples section are example sequences of orthologues and paralogues of the bZIP-S polypeptide represented by SEQ ID NO: 422, the terms “orthologues” and “paralogues” being as defined herein. Further orthologues and paralogues may readily be identified by performing a so-called reciprocal blast search as described in the definitions section; where the query sequence is SEQ ID NO: 421 or SEQ ID NO: 422, the second BLAST (back-BLAST) would be against Medicago truncatula sequences.

[0241] The invention also provides hitherto unknown bZIP-S-encoding nucleic acids and bZIP-S polypeptides useful for conferring enhanced yield-related traits in plants relative to control plants.

[0242] According to a further embodiment of the present invention, there is therefore provided an isolated nucleic acid molecule selected from:
[0243] (i) a nucleic acid represented by any of the nucleic acids of Table A4;
[0244] (ii) the complement of a nucleic acid represented by any of the nucleic acids of Table A4;
[0245] (iii) a nucleic acid encoding a bZIP-S polypeptide having in increasing order of preference at least 50%, 51%, 52%, 53%, 54%, 55%, 56%, 57%, 58%, 59%, 60%, 61%, 62%, 63%, 64%, 65%, 66%, 67%, 68%, 69%, 70%, 71%, 72%, 73%, 74%, 75%, 76%, 77%, 78%, 79%, 80%, 81%, 82%, 83%, 84%, 85%, 86%, 87%, 88%, 89%, 90%, 91%, 92%, 93%, 94%, 95%, 96%, 97%, 98%, or 99% sequence identity to the amino acid sequence represented by any of the polypeptides of Table A4 and additionally or alternatively comprising one or more motifs having in increasing order of preference at least 50%, 55%, 60%, 65%, 70%, 75%, 80%, 85%, 90%, 95%, 96%, 97%, 98%, 99% or more sequence identity to any one or more of the motifs given in SEQ ID NO: 501 to SEQ ID NO: 626, and further preferably conferring enhanced yield-related traits relative to control plants.
[0246] (iv) a nucleic acid molecule which hybridizes with a nucleic acid molecule of (i) to (iii) under high stringency hybridization conditions and preferably confers enhanced yield-related traits relative to control plants.

[0247] According to a further embodiment of the present invention, there is also provided an isolated polypeptide selected from:
[0248] (i) an amino acid sequence represented by any of the polypeptides of Table A4;
[0249] (ii) an amino acid sequence having, in increasing order of preference, at least 50%, 51%, 52%, 53%, 54%, 55%, 56%, 57%, 58%, 59%, 60%, 61%, 62%, 63%, 64%, 65%, 66%, 67%, 68%, 69%, 70%, 71%, 72%, 73%, 74%, 75%, 76%, 77%, 78%, 79%, 80%, 81%, 82%, 83%, 84%, 85%, 86%, 87%, 88%, 89%, 90%, 91%, 92%, 93%, 94%, 95%, 96%, 97%, 98%, or 99% sequence identity to the amino acid sequence represented by any of the polypeptides of Table A4, and additionally or alternatively comprising one or more motifs having in increasing order of preference at least 50%, 55%, 60%, 65%, 70%, 75%, 80%, 85%, 90%, 95%, 96%, 97%, 98%, 99% or more sequence identity to any one or more of the motifs given in SEQ ID NO: 501 to SEQ ID NO: 626, and further preferably conferring enhanced yield-related traits relative to control plants;
[0250] (iii) derivatives of any of the amino acid sequences given in (i) or (ii) above.

[0251] Concerning SPA15-like polypeptides, the present invention is illustrated by transforming plants with the nucleic acid sequence represented by SEQ ID NO: 633, encoding the polypeptide sequence of SEQ ID NO: 634. However, performance of the invention is not restricted to these sequences; the methods of the invention may advantageously be performed using any SPA15-like-encoding nucleic acid or SPA15-like polypeptide as defined herein.

[0252] Examples of nucleic acids encoding SPA15-like polypeptides are given in Table A5 of the Examples section herein. Such nucleic acids are useful in performing the methods of the invention. The amino acid sequences given in Table A5 of the Examples section are example sequences of orthologues and paralogues of the SPA15-like polypeptide represented by SEQ ID NO: 634, the terms “orthologues” and “paralogues” being as defined herein. Further orthologues and paralogues may readily be identified by performing a so-called reciprocal blast search as described in the definitions section; where the query sequence is SEQ ID NO: 633 or SEQ ID NO: 634, the second BLAST (back-BLAST) would be against rice sequences.

[0253] The invention also provides hitherto unknown SPA15-like-encoding nucleic acids and SPA15-like polypeptides useful for conferring enhanced yield-related traits in plants relative to control plants.

[0254] According to a further embodiment of the present invention, there is therefore provided an isolated nucleic acid molecule selected from:
[0255] (i) a nucleic acid represented by any one of SEQ ID NO: 633;
[0256] (ii) the complement of a nucleic acid represented by any one of SEQ ID NO: 633;
[0257] (iii) a nucleic acid encoding the polypeptide as represented by any one of SEQ ID NO: 634, preferably as a result of the degeneracy of the genetic code, said isolated nucleic acid can be derived from a polypeptide sequence as represented by any one of SEQ ID NO: 634, and further preferably confers enhanced yield-related traits relative to control plants;
[0258] (iv) a nucleic acid having, in increasing order of preference at least 30%, 31%, 32%, 33%, 34%, 35%, 36%, 37%, 38%, 39%, 40%, 41%, 42%, 43%, 44%, 45%, 46%, 47%, 48%, 49%, 50%, 51%, 52%, 53%, 54%, 55%, 56%, 57%, 58%, 59%, 60%, 61%, 62%, 63%, 64%, 65%, 66%, 67%, 68%, 69%, 70%, 71%, 72%, 73%, 74%, 75%, 76%, 77%, 78%, 79%, 80%, 81%, 82%, 83%, 84%, 85%, 86%, 87%, 88%, 89%, 90%, 91%, 92%, 93%, 94%, 95%, 96%, 97%, 98%, or 99% sequence identity with any of the nucleic acid sequences of table A5 and further preferably conferring enhanced yield-related traits relative to control plants;
[0259] (v) a nucleic acid molecule which hybridizes with a nucleic acid molecule of (i) to (iv) under stringent hybridization conditions and preferably confers enhanced yield-related traits relative to control plants;
[0260] (vi) a nucleic acid encoding a SPA15-like polypeptide having, in increasing order of preference, at least 50%, 51%, 52%, 53%, 54%, 55%, 56%, 57%, 58%, 59%, 60%, 61%, 62%, 63%, 64%, 65%, 66%, 67%, 68%, 69%, 70%, 71%, 72%, 73%, 74%, 75%, 76%, 77%, 78%, 79%, 80%, 81%, 82%, 83%, 84%, 85%, 86%, 87%, 88%, 89%, 90%, 91%, 92%, 93%, 94%, 95%, 96%, 97%, 98%, or 99% sequence identity to the amino acid sequence represented by any one of SEQ ID NO: 634, and any of the other amino acid sequences in Table A5 and preferably conferring enhanced yield-related traits relative to control plants.

[0261] According to a further embodiment of the present invention, there is also provided an isolated polypeptide selected from:
[0262] (i) an amino acid sequence represented by any one of SEQ ID NO: 634;
[0263] (ii) an amino acid sequence having, in increasing order of preference, at least 50%, 51%, 52%, 53%, 54%, 55%, 56%, 57%, 58%, 59%, 60%, 61%, 62%, 63%, 64%, 65%, 66%, 67%, 68%, 69%, 70%, 71%, 72%, 73%, 74%, 75%, 76%, 77%, 78%, 79%, 80%, 81%, 82%, 83%, 84%, 85%, 86%, 87%, 88%, 89%, 90%, 91%, 92%, 93%, 94%, 95%, 96%, 97%, 98%, or 99% sequence identity to the amino acid sequence represented by any one of SEQ ID NO: 634, and any of the other amino acid sequences in Table A5 and preferably conferring enhanced yield-related traits relative to control plants.
[0264] (iii) derivatives of any of the amino acid sequences given in (i) or (ii) above.

[0265] Nucleic acid variants may also be useful in practicing the methods of the invention. Examples of such variants include nucleic acids encoding homologues and derivatives of any one of the amino acid sequences given in Table A1 to A5 of the Examples section, the terms “homologue” and “derivative” being as defined herein. Also useful in the methods of the invention are nucleic acids encoding homologues and derivatives of orthologues or paralogues of any one of the amino acid sequences given in Table A1 to A5 of the Examples section. Homologues and derivatives useful in the methods of the present invention have substantially the same biological and functional activity as the unmodified protein from which they are derived. Further variants useful in practicing the methods of the invention are variants in which codon usage is optimised or in which miRNA target sites are removed.

[0266] Further nucleic acid variants useful in practicing the methods of the invention include portions of nucleic acids encoding O-FUT polypeptides, or By-Pass (BPS) polypeptides, or SIZ1 polypeptides, or bZIP-S polypeptides, or SPA15-like polypeptides, nucleic acids hybridising to nucleic acids encoding O-FUT polypeptides, or By-Pass (BPS) polypeptides, or SIZ1 polypeptides, or bZIP-S polypeptides, or SPA15-like polypeptides, splice variants of nucleic acids encoding O-FUT polypeptides, or By-Pass (BPS) polypeptides, or SIZ1 polypeptides, or bZIP-S polypeptides, or SPA15-like polypeptides, allelic variants of nucleic acids encoding an O-FUT polypeptides, or By-Pass (BPS) polypeptides, or SIZ1 polypeptides, or bZIP-S polypeptides, or SPA15-like polypeptides and variants of nucleic acids encoding O-FUT polypeptides, or By-Pass (BPS) polypeptides, or SIZ1 polypeptides, or bZIP-S polypeptides, or SPA15-like polypeptides obtained by gene shuffling. The terms hybridising sequence, splice variant, allelic variant and gene shuffling are as described herein.

[0267] Nucleic acids encoding O-FUT polypeptides, or By-Pass (BPS) polypeptides, or SIZ1 polypeptides, or bZIP-S polypeptides, or SPA15-like polypeptides need not be full-length nucleic acids, since performance of the methods of the invention does not rely on the use of full-length nucleic acid sequences. According to the present invention, there is provided a method for enhancing yield-related traits in plants, comprising introducing and expressing in a plant a portion of any one of the nucleic acid sequences given in Table A1 to A5 of the Examples section, or a portion of a nucleic acid encoding an orthologue, paralogue or homologue of any of the amino acid sequences given in Table A1 to A5 of the Examples section.

[0268] A portion of a nucleic acid may be prepared, for example, by making one or more deletions to the nucleic acid. The portions may be used in isolated form or they may be fused to other coding (or non-coding) sequences in order to, for example, produce a protein that combines several activities. When fused to other coding sequences, the resultant polypeptide produced upon translation may be bigger than that predicted for the protein portion.

[0269] Concerning O-FUT-like polypeptides, portions useful in the methods of the invention, encode an O-FUT polypeptide as defined herein, and have substantially the same biological activity as the amino acid sequences given in Table A1 of the Examples section. Preferably, the portion is a portion of any one of the nucleic acids given in Table A1 of the Examples section, or is a portion of a nucleic acid encoding an orthologue or paralogue of any one of the amino acid sequences given in Table A1 of the Examples section. Preferably the portion is at least 500, 550, 600, 650, 700, 750, 800, 850, 900, 950, 1000 consecutive nucleotides in length, the consecutive nucleotides being of any one of the nucleic acid sequences given in Table A1 of the Examples section, or of a nucleic acid encoding an orthologue or paralogue of any one of the amino acid sequences given in Table A1 of the Examples section. Most preferably the portion is a portion of the nucleic acid of SEQ ID NO: 1. Preferably, the portion encodes a fragment of an amino acid sequence which, when used in the construction of a phylogenetic tree, such as the one depicted in FIG. 3, clusters with the group of O-FUT polypeptides comprising the amino acid sequence represented by SEQ ID NO: 2 rather than with any other group and/or comprises motifs 1 to 3 and/or has a peptide-O-fucosyltransferase biological activity and/or has at least 50% sequence identity to SEQ ID NO: 2.

[0270] Concerning By-Pass (BPS) polypeptides, portions useful in the methods of the invention, encode a BPS polypeptide as defined herein, and have substantially the same biological activity as the amino acid sequences given in Table A2 of the Examples section. Preferably, the portion is a portion of any one of the nucleic acids given in Table A2 of the Examples section, or is a portion of a nucleic acid encoding an orthologue or paralogue of any one of the amino acid sequences given in Table A2 of the Examples section. Preferably the portion is at least 500, 550, 600, 650, 700, 750, 800, 850, 900, 950, 1000 consecutive nucleotides in length, the consecutive nucleotides being of any one of the nucleic acid sequences given in Table A2 of the Examples section, or of a nucleic acid encoding an orthologue or paralogue of any one of the amino acid sequences given in Table A2 of the Examples section. Most preferably the portion is a portion of the nucleic acid of SEQ ID NO: 267.

[0271] Preferably, the portion encodes a fragment of an amino acid sequence which, when used in the construction of a phylogenetic tree, such as the one depicted in FIG. 6, clusters with the group of BPS polypeptides comprising the amino acid sequence represented by SEQ ID NO: 268 rather than with any other group and/or comprises motifs 4 to 12 and/or has at least 40% sequence identity to SEQ ID NO: 268.

[0272] Concerning SIZ1 polypeptides, portions useful in the methods of the invention, encode a SIZ1 polypeptide as defined herein, and have substantially the same biological activity as the amino acid sequences given in Table A3 of the Examples section. Preferably, the portion is a portion of any one of the nucleic acids given in Table A3 of the Examples section, or is a portion of a nucleic acid encoding an orthologue or paralogue of any one of the amino acid sequences given in Table A3 of the Examples section. Preferably the portion is at least 500, 550, 600, 650, 700, 750, 800, 850, 900, 950, 1000 consecutive nucleotides in length, the consecutive nucleotides being of any one of the nucleic acid sequences given in Table A3 of the Examples section, or of a nucleic acid encoding an orthologue or paralogue of any one of the amino acid sequences given in Table A3 of the Examples section. Most preferably the portion is a portion of the nucleic acid of SEQ ID NO: 353. Preferably, the portion encodes a fragment of an amino acid sequence which, when used in the construction of a phylogenetic tree, such as the one depicted in FIG. 10, clusters with the group of SIZ1 polypeptides comprising the amino acid sequence represented by SEQ ID NO: 354 rather than with any other group and/or comprises motifs 13 to 18 and/or has biological activity of a SUMO E3 ligase and/or has at least 40% sequence identity to SEQ ID NO: 354.

[0273] Concerning bZIP-S polypeptides, portions useful in the methods of the invention, encode a bZIP-S polypeptide as defined herein, and have substantially the same biological activity as the amino acid sequences given in Table A4 of the Examples section. Preferably, the portion is a portion of any one of the nucleic acids given in Table A4 of the Examples section, or is a portion of a nucleic acid encoding an orthologue or paralogue of any one of the amino acid sequences given in Table A4 of the Examples section. Preferably the portion is at least 100, 200, 300, 400, 500, 550, 600, 650, 700, 750, 800, 850, 900, 950, 1000 consecutive nucleotides in length, the consecutive nucleotides being of any one of the nucleic acid sequences given in Table A4 of the Examples section, or of a nucleic acid encoding an orthologue or paralogue of any one of the amino acid sequences given in Table A4 of the Examples section. Most preferably the portion is a portion of the nucleic acid of SEQ ID NO: 421. Preferably, the portion encodes a fragment of an amino acid sequence comprising a bZIP domain and one or more of Motifs 19 to 21 as defined herein.

[0274] Concerning SPA15-like polypeptides, portions useful in the methods of the invention, encode a SPA15-like polypeptide as defined herein, and have substantially the same biological activity as the amino acid sequences given in Table A5 of the Examples section. Preferably, the portion is a portion of any one of the nucleic acids given in Table A5 of the Examples section, or is a portion of a nucleic acid encoding an orthologue or paralogue of any one of the amino acid sequences given in Table A5 of the Examples section. Preferably the portion is at least 500, 550, 600, 650, 700, 750, 800, 850, 900, 950, 1000 consecutive nucleotides in length, the consecutive nucleotides being of any one of the nucleic acid sequences given in Table A5 of the Examples section, or of a nucleic acid encoding an orthologue or paralogue of any one of the amino acid sequences given in Table A5 of the Examples section. Most preferably the portion is a portion of the nucleic acid of SEQ ID NO: 633. Preferably, the portion encodes a fragment of an amino acid sequence which, when used in the construction of a phylogenetic tree, such as the one depicted in FIG. 16, clusters with the group of SPA15-like polypeptides comprising the amino acid sequence represented by SEQ ID NO: 634 rather than with any other group and/or comprises one or more of the motifs 22 to 30 and/or has at least 30% sequence identity to SEQ ID NO: 634.

[0275] Concerning O-FUT polypeptides, or By-Pass (BPS) polypeptides, or SIZ1 polypeptides, or bZIP-S polypeptides, or SPA15-like polypeptides, another nucleic acid variant useful in the methods of the invention is a nucleic acid capable of hybridising, under reduced stringency conditions, preferably under stringent conditions, with a nucleic acid encoding an O-FUT polypeptide, or a By-Pass (BPS) polypeptide, or a SIZ1 polypeptide, or a bZIP-S polypeptide, or a SPA15-like polypeptide, as defined herein, or with a portion as defined herein.

[0276] According to the present invention, there is provided a method for enhancing yield-related traits in plants, comprising introducing and expressing in a plant a nucleic acid capable of hybridizing to any one of the nucleic acids given in Table A1 to A5 of the Examples section, or comprising introducing and expressing in a plant a nucleic acid capable of hybridising to a nucleic acid encoding an orthologue, paralogue or homologue of any of the nucleic acid sequences given in Table A1 to A5 of the Examples section.

[0277] Concerning O-FUT-like polypeptides, hybridising sequences useful in the methods of the invention encode an O-FUT polypeptide as defined herein, having substantially the same biological activity as the amino acid sequences given in Table A1 of the Examples section. Preferably, the hybridising sequence is capable of hybridising to the complement of any one of the nucleic acids given in Table A1 of the Examples section, or to a portion of any of these sequences, a portion being as defined above, or the hybridising sequence is capable of hybridising to the complement of a nucleic acid encoding an orthologue or paralogue of any one of the amino acid sequences given in Table A1 of the Examples section. Most preferably, the hybridising sequence is capable of hybridising to the complement of a nucleic acid as represented by SEQ ID NO: 1 or to a portion thereof.

[0278] Preferably, the hybridising sequence encodes a polypeptide with an amino acid sequence which, when full-length and used in the construction of a phylogenetic tree, such as the one depicted in FIG. 3, clusters with the group of O-FUT polypeptides comprising the amino acid sequence represented by SEQ ID NO: 2 rather than with any other group and/or comprises motifs 1 to 3 and/or has a peptide-O-fucosyltransferase biological activity and/or has at least 50% sequence identity to SEQ ID NO: 2.

[0279] Concerning By-Pass (BPS) polypeptides, hybridising sequences useful in the methods of the invention encode a BPS polypeptide as defined herein, having substantially the same biological activity as the amino acid sequences given in Table A2 of the Examples section. Preferably, the hybridising sequence is capable of hybridising to the complement of any one of the nucleic acids given in Table A2 of the Examples section, or to a portion of any of these sequences, a portion being as defined above, or the hybridising sequence is capable of hybridising to the complement of a nucleic acid encoding an orthologue or paralogue of any one of the amino acid sequences given in Table A2 of the Examples section. Most preferably, the hybridising sequence is capable of hybridising to the complement of a nucleic acid as represented by SEQ ID NO: 267 or to a portion thereof.

[0280] Preferably, the hybridising sequence encodes a polypeptide with an amino acid sequence which, when full-length and used in the construction of a phylogenetic tree, such as the one depicted in FIG. 9, clusters with the group of BPS polypeptides comprising the amino acid sequence represented by SEQ ID NO: 268 rather than with any other group and/or comprises motifs 4 to 12 and/or has at least 40% sequence identity to SEQ ID NO: 268.

[0281] Concerning SIZ1 polypeptides, hybridising sequences useful in the methods of the invention encode a SIZ1 polypeptide as defined herein, having substantially the same biological activity as the amino acid sequences given in Table A3 of the Examples section. Preferably, the hybridising sequence is capable of hybridising to the complement of any one of the nucleic acids given in Table A3 of the Examples section, or to a portion of any of these sequences, a portion being as defined above, or the hybridising sequence is capable of hybridising to the complement of a nucleic acid encoding an orthologue or paralogue of any one of the amino acid sequences given in Table A3 of the Examples section. Most preferably, the hybridising sequence is capable of hybridising to the complement of a nucleic acid as represented by SEQ ID NO: 353 or to a portion thereof.

[0282] Preferably, the hybridising sequence encodes a polypeptide with an amino acid sequence which, when full-length and used in the construction of a phylogenetic tree, such as the one depicted in FIG. 10, clusters with the group of SIZ1 polypeptides SUMO E3 ligases comprising the amino acid sequence represented by SEQ ID NO: 354 rather than with any other group and/or comprises motifs 13 to 18 and/or has biological activity of a SUMO E3 ligase and/or has at least 40% sequence identity to SEQ ID NO: 354.

[0283] Concerning bZIP-S polypeptides, hybridising sequences useful in the methods of the invention encode a bZIP-S polypeptide as defined herein, having substantially the same biological activity as the amino acid sequences given in Table A4 of the Examples section. Preferably, the hybridising sequence is capable of hybridising to the complement of any one of the nucleic acids given in Table A4 of the Examples section, or to a portion of any of these sequences, a portion being as defined above, or the hybridising sequence is capable of hybridising to the complement of a nucleic acid encoding an orthologue or paralogue of any one of the amino acid sequences given in Table A4 of the Examples section. Most preferably, the hybridising sequence is capable of hybridising to the complement of a nucleic acid as represented by SEQ ID NO: 421 or to a portion thereof.

[0284] Preferably, the hybridising sequence encodes a polypeptide with an amino acid sequence comprising a bZIP domain and one or more of Motifs 19 to 21 as defined herein.

[0285] Concerning SPA15-like polypeptides, hybridising sequences useful in the methods of the invention encode a SPA15-like polypeptide as defined herein, having substantially the same biological activity as the amino acid sequences given in Table A5 of the Examples section. Preferably, the hybridising sequence is capable of hybridising to the complement of any one of the nucleic acids given in Table A5 of the Examples section, or to a portion of any of these sequences, a portion being as defined above, or the hybridising sequence is capable of hybridising to the complement of a nucleic acid encoding an orthologue or paralogue of any one of the amino acid sequences given in Table A5 of the Examples section. Most preferably, the hybridising sequence is capable of hybridising to the complement of a nucleic acid as represented by SEQ ID NO: 633 or to a portion thereof.

[0286] Preferably, the hybridising sequence encodes a polypeptide with an amino acid sequence which, when full-length and used in the construction of a phylogenetic tree, such as the one depicted in FIG. 16, clusters with the group of SPA15-like polypeptides comprising the amino acid sequence represented by SEQ ID NO: 634 rather than with any other group and/or comprises one or more of the motifs 22 to 30 and/or has at least 30% sequence identity to SEQ ID NO: 634.

[0287] Another nucleic acid variant useful in the methods of the invention is a splice variant encoding an O-FUT polypeptide, or a By-Pass (BPS) polypeptide, or a SIZ1 polypeptide, or a bZIP-S polypeptide, or a SPA15-like polypeptide as defined hereinabove, a splice variant being as defined herein.

[0288] According to the present invention, there is provided a method for enhancing yield-related traits in plants, comprising introducing and expressing in a plant a splice variant of any one of the nucleic acid sequences given in Table A1 to A5 of the Examples section, or a splice variant of a nucleic acid encoding an orthologue, paralogue or homologue of any of the amino acid sequences given in Table A1 to A5 of the Examples section.

[0289] Concerning O-FUT-like polypeptides, preferred splice variants are splice variants of a nucleic acid represented by SEQ ID NO: 1, or a splice variant of a nucleic acid encoding an orthologue or paralogue of SEQ ID NO: 2. Preferably, the amino acid sequence encoded by the splice variant, when used in the construction of a phylogenetic tree, such as the one depicted in FIG. 3, clusters with the group of O-FUT polypeptides comprising the amino acid sequence represented by SEQ ID NO: 2 rather than with any other group and/or comprises motifs 1 to 3 and/or has a peptide-O-fucosyltransferase biological activity and/or has at least 50% sequence identity to SEQ ID NO: 2.

[0290] Concerning By-Pass (BPS) polypeptides, preferred splice variants are splice variants of a nucleic acid represented by SEQ ID NO: 267, or a splice variant of a nucleic acid encoding an orthologue or paralogue of SEQ ID NO: 268. Preferably, the amino acid sequence encoded by the splice variant, when used in the construction of a phylogenetic tree, such as the one depicted in FIG. 6, clusters with the group of BPS polypeptides comprising the amino acid sequence represented by SEQ ID NO:268 rather than with any other group and/or comprises motifs 4 to 12 and/or has at least 40% sequence identity to SEQ ID NO: 268.

[0291] Concerning SIZ1 polypeptides, preferred splice variants are splice variants of a nucleic acid represented by SEQ ID NO: 353, or a splice variant of a nucleic acid encoding an orthologue or paralogue of SEQ ID NO: 354. Preferably, the amino acid sequence encoded by the splice variant, when used in the construction of a phylogenetic tree, such as the one depicted in FIG. 10, clusters with the group of SIZ1 polypeptides SUMO E3 ligases comprising the amino acid sequence represented by SEQ ID NO: 354 rather than with any other group and/or comprises motifs 13 to 18 and/or has biological activity of a SUMO E3 ligase and/or has at least 40% sequence identity to SEQ ID NO: 353.

[0292] Concerning bZIP-S polypeptides, preferred splice variants are splice variants of a nucleic acid represented by SEQ ID NO: 421, or a splice variant of a nucleic acid encoding an orthologue or paralogue of SEQ ID NO: 422. Preferably, the amino acid sequence encoded by the splice variant comprises a bZIP domain and one or more of Motifs 19 to 21 as defined herein.

[0293] Concerning SPA15-like polypeptides, preferred splice variants are splice variants of a nucleic acid represented by SEQ ID NO: 633, or a splice variant of a nucleic acid encoding an orthologue or paralogue of SEQ ID NO: 634. Preferably, the amino acid sequence encoded by the splice variant, when used in the construction of a phylogenetic tree, such as the one depicted in FIG. 16, clusters with the group of SPA15-like polypeptides comprising the amino acid sequence represented by SEQ ID NO: 634 rather than with any other group and/or comprises one or more of the motifs 22 to 30, and/or has at least 30% sequence identity to SEQ ID NO: 634.

[0294] Another nucleic acid variant useful in performing the methods of the invention is an allelic variant of a nucleic acid encoding an O-FUT polypeptide, or a By-Pass (BPS) polypeptide, or a SIZ1 polypeptide, or a bZIP-S polypeptide, or a SPA15-like polypeptide, as defined hereinabove, an allelic variant being as defined herein.

[0295] According to the present invention, there is provided a method for enhancing yield-related traits in plants, comprising introducing and expressing in a plant an allelic variant of any one of the nucleic acids given in Table A1 to A5 of the Examples section, or comprising introducing and expressing in a plant an allelic variant of a nucleic acid encoding an orthologue, paralogue or homologue of any of the amino acid sequences given in Table A1 to A5 of the Examples section.

[0296] Concerning O-FUT-like polypeptides, the polypeptides encoded by allelic variants useful in the methods of the present invention have substantially the same biological activity as the O-FUT polypeptide of SEQ ID NO: 2 and any of the amino acids depicted in Table A1 of the Examples section. Allelic variants exist in nature, and encompassed within the methods of the present invention is the use of these natural alleles. Preferably, the allelic variant is an allelic variant of SEQ ID NO: 1 or an allelic variant of a nucleic acid encoding an orthologue or paralogue of SEQ ID NO: 2. Preferably, the amino acid sequence encoded by the allelic variant, when used in the construction of a phylogenetic tree, such as the one depicted in FIG. 3, clusters with the group of O-FUT polypeptides comprising the amino acid sequence represented by SEQ ID NO: 2 rather than with any other group and/or comprises motifs 1 to 3 and/or has a peptide-O-fucosyltransferase biological activity and/or has at least 50% sequence identity to SEQ ID NO: 2.

[0297] Concerning By-Pass (BPS) polypeptides, the polypeptides encoded by allelic variants useful in the methods of the present invention have substantially the same biological activity as the BPS polypeptide of SEQ ID NO: 267 and any of the amino acids depicted in Table A2 of the Examples section. Allelic variants exist in nature, and encompassed within the methods of the present invention is the use of these natural alleles. Preferably, the allelic variant is an allelic variant of SEQ ID NO: 266 or an allelic variant of a nucleic acid encoding an orthologue or paralogue of SEQ ID NO: 267. Preferably, the amino acid sequence encoded by the allelic variant, when used in the construction of a phylogenetic tree, such as the one depicted in FIG. 6, clusters with the group of BPS polypeptides comprising the amino acid sequence represented by SEQ ID NO: 267 rather than with any other group and/or comprises motifs 4 to 12 and/or has at least 40% sequence identity to SEQ ID NO: 267.

[0298] Concerning SIZ1 polypeptides, the polypeptides encoded by allelic variants useful in the methods of the present invention have substantially the same biological activity as the SIZ1 polypeptide of SEQ ID NO: 354 and any of the amino acids depicted in Table A3 of the Examples section. Allelic variants exist in nature, and encompassed within the methods of the present invention is the use of these natural alleles. Preferably, the allelic variant is an allelic variant of SEQ ID NO: 353 or an allelic variant of a nucleic acid encoding an orthologue or paralogue of SEQ ID NO: 354. Preferably, the amino acid sequence encoded by the allelic variant, when used in the construction of a phylogenetic tree, such as the one depicted in FIG. 10, clusters with the SIZ1 polypeptides SUMO E3 ligases comprising the amino acid sequence represented by SEQ ID NO: 354 rather than with any other group and/or comprises motifs 13 to 18 and/or has biological activity SUMO E3 ligase and/or has at least 40% sequence identity to SEQ ID NO: 354.

[0299] Concerning bZIP-S polypeptides, the polypeptides encoded by allelic variants useful in the methods of the present invention have substantially the same biological activity as the bZIP-S polypeptide of SEQ ID NO: 422 and any of the amino acids depicted in Table A4 of the Examples section. Allelic variants exist in nature, and encompassed within the methods of the present invention is the use of these natural alleles. Preferably, the allelic variant is an allelic variant of SEQ ID NO: 421 or an allelic variant of a nucleic acid encoding an orthologue or paralogue of SEQ ID NO: 422. Preferably, the amino acid sequence encoded by the allelic comprises a bZIP domain and one or more of Motifs 19 to 21 as defined herein.

[0300] Concerning SPA15-like polypeptides, the polypeptides encoded by allelic variants useful in the methods of the present invention have substantially the same biological activity as the SPA15-like polypeptide of SEQ ID NO: 633 and any of the amino acids depicted in Table A5 of the Examples section. Allelic variants exist in nature, and encompassed within the methods of the present invention is the use of these natural alleles. Preferably, the allelic variant is an allelic variant of SEQ ID NO: 632 or an allelic variant of a nucleic acid encoding an orthologue or paralogue of SEQ ID NO: 633. Preferably, the amino acid sequence encoded by the allelic variant, when used in the construction of a phylogenetic tree, such as the one depicted in FIG. 16, clusters with the group of SPA15-like polypeptides comprising the amino acid sequence represented by SEQ ID NO: 633 rather than with any other group and/or comprises one or more of the motifs 22 to 30, and/or has at least 30% sequence identity to SEQ ID NO: 633.

[0301] Gene shuffling or directed evolution may also be used to generate variants of nucleic acids encoding O-FUT polypeptides, or By-Pass (BPS) polypeptides, or SIZ1 polypeptides, or bZIP-S polypeptides, or SPA15-like polypeptides, as defined above; the term “gene shuffling” being as defined herein.

[0302] According to the present invention, there is provided a method for enhancing yield-related traits in plants, comprising introducing and expressing in a plant a variant of any one of the nucleic acid sequences given in Table A1 to a5 of the Examples section, or comprising introducing and expressing in a plant a variant of a nucleic acid encoding an orthologue, paralogue or homologue of any of the amino acid sequences given in Table A1 to A5 of the Examples section, which variant nucleic acid is obtained by gene shuffling.

[0303] Concerning O-FUT-like polypeptides, the amino acid sequence encoded by the variant nucleic acid obtained by gene shuffling, when used in the construction of a phylogenetic tree such as the one depicted in FIG. 3, preferably clusters with the group of O-FUT polypeptides comprising the amino acid sequence represented by SEQ ID NO: 2 rather than with any other group and/or comprises motifs 1 to 3 and/or has a peptide-O-fucosyltransferase biological activity and/or has at least 50% sequence identity to SEQ ID NO: 2.

[0304] Concerning By-Pass (BPS) polypeptides, the amino acid sequence encoded by the variant nucleic acid obtained by gene shuffling, when used in the construction of a phylogenetic tree such as the one depicted in FIG. 6, preferably clusters with the group of BPS polypeptides comprising the amino acid sequence represented by SEQ ID NO: 268 rather than with any other group and/or comprises motifs 4 to 12 and/or has at least 40% sequence identity to SEQ ID NO: 268.

[0305] Concerning SIZ1 polypeptides, the amino acid sequence encoded by the variant nucleic acid obtained by gene shuffling, when used in the construction of a phylogenetic tree such as the one depicted in FIG. 10, preferably clusters with the group of SIZ1 polypeptides SUMO E3 ligases comprising the amino acid sequence represented by SEQ ID NO: 354 rather than with any other group and/or comprises motifs 13 to 18 and/or has biological activity SUMO E3 ligase and/or has at least 40% sequence identity to SEQ ID NO: 354.

[0306] Concerning bZIP-S polypeptides, preferably, the amino acid sequence encoded by the variant nucleic acid obtained by gene shuffling comprises a bZIP domain and one or more of Motifs 19 to 21 as defined herein.

[0307] Concerning SPA15-like polypeptides, the amino acid sequence encoded by the variant nucleic acid obtained by gene shuffling, when used in the construction of a phylogenetic tree such as the one depicted in FIG. 16, clusters with the group of SPA15-like polypeptides comprising the amino acid sequence represented by SEQ ID NO: 634 rather than with any other group and/or comprises one or more of the motifs 22 to 30 and/or has at least 30% sequence identity to SEQ ID NO: 634.

[0308] Furthermore, nucleic acid variants may also be obtained by site-directed mutagenesis. Several methods are available to achieve site-directed mutagenesis, the most common being PCR based methods (Current Protocols in Molecular Biology. Wiley Eds.).

[0309] Concerning O-FUT-like polypeptides, nucleic acids encoding O-FUT polypeptides may be derived from any natural or artificial source. The nucleic acid may be modified from its native form in composition and/or genomic environment through deliberate human manipulation. Preferably the O-FUT polypeptide-encoding nucleic acid is from a plant, further preferably from a monocotyledonous plant, more preferably from the family Poaceae, most preferably the nucleic acid is from Oryza sativa.

[0310] Concerning By-Pass (BPS) polypeptides, nucleic acids encoding BPS polypeptides may be derived from any natural or artificial source. The nucleic acid may be modified from its native form in composition and/or genomic environment through deliberate human manipulation. Preferably the BPS polypeptide-encoding nucleic acid is from a plant, further preferably from a dicotyledonous plant, more preferably from the family Brassicaceae, most preferably the nucleic acid is from Arabidopsis thaliana.

[0311] Concerning SIZ1 polypeptides, nucleic acids encoding SIZ1 polypeptides may be derived from any natural or artificial source. The nucleic acid may be modified from its native form in composition and/or genomic environment through deliberate human manipulation. Preferably the SIZ1 polypeptide-encoding nucleic acid is from a plant, further preferably from a dicotyledonous plant, more preferably from the family Brassicaceae, most preferably the nucleic acid is from Arabidopsis thaliana.

[0312] Concerning bZIP-S polypeptides, nucleic acids encoding bZIP-S polypeptides may be derived from any natural or artificial source. The nucleic acid may be modified from its native form in composition and/or genomic environment through deliberate human manipulation. Preferably the bZIP-S polypeptide-encoding nucleic acid is from a plant, further preferably from a monocotyledonous plant, more preferably from the family Fabaceae, most preferably the nucleic acid is from Medicago truncatula.

[0313] Concerning SPA15-like polypeptides, nucleic acids encoding SPA15-like polypeptides may be derived from any natural or artificial source. The nucleic acid may be modified from its native form in composition and/or genomic environment through deliberate human manipulation. Preferably the SPA15-like polypeptide-encoding nucleic acid is from a plant, further preferably from a monocotyledonous plant, more preferably from the family Poaceae, most preferably the nucleic acid is from Oryza sativa.

[0314] Performance of the methods of the invention gives plants having enhanced yield-related traits. In particular performance of the methods of the invention gives plants having increased yield, especially increased seed yield relative to control plants. The terms “yield” and “seed yield” are described in more detail in the “definitions” section herein.

[0315] Reference herein to enhanced yield-related traits is taken to mean an increase early vigour and/or in biomass (weight) of one or more parts of a plant, which may include aboveground (harvestable) parts and/or (harvestable) parts below ground. In particular, such harvestable parts are seeds, and performance of the methods of the invention results in plants having increased seed yield relative to the seed yield of control plants.

[0316] Concerning O-FUT-like polypeptides, the present invention provides a method for increasing yield, especially seed yield of plants, relative to control plants, which method comprises modulating expression in a plant of a nucleic acid encoding an O-FUT polypeptide as defined herein.

[0317] Concerning By-Pass (BPS) polypeptides, the present invention provides a method for increasing yield-related traits, especially seed yield of plants, relative to control plants, which method comprises modulating expression in a plant of a nucleic acid encoding a BPS polypeptide as defined herein.

[0318] Concerning SIZ1 polypeptides, the present invention provides a method for increasing yield, especially seed yield of plants, relative to control plants, which method comprises modulating expression in a plant of a nucleic acid encoding a SIZ1 polypeptide as defined herein.

[0319] Concerning bZIP-S polypeptides, the present invention provides a method for increasing yield-related traits, especially seed yield of plants, relative to control plants, which method comprises modulating expression in a plant of a nucleic acid encoding a bZIP-S polypeptide as defined herein.

[0320] Concerning SPA15-like polypeptides, the present invention provides a method for increasing yield-related traits, especially seed yield of plants, relative to control plants, which method comprises modulating expression in a plant of a nucleic acid encoding a SPA15-like polypeptide as defined herein.

[0321] Since the transgenic plants according to the present invention have increased yield, it is likely that these plants exhibit an increased growth rate (during at least part of their life cycle), relative to the growth rate of control plants at a corresponding stage in their life cycle.

[0322] According to a preferred feature of the present invention, performance of the methods of the invention gives plants having an increased growth rate relative to control plants. Therefore, according to the present invention, there is provided a method for increasing the growth rate of plants, which method comprises modulating expression in a plant of a nucleic acid encoding a fucose protein O-fucosyltransferase (O-FUT) polypeptide, or a By-Pass (BPS) polypeptide, or a SIZ1 polypeptide, or a bZIP-S polypeptide, or a SPA15-like polypeptide as defined herein.

[0323] Performance of the methods of the invention gives plants grown under non-stress conditions or under mild drought conditions increased yield relative to control plants grown under comparable conditions. Therefore, according to the present invention, there is provided a method for increasing yield in plants grown under non-stress conditions or under mild drought conditions, which method comprises modulating expression in a plant of a nucleic acid encoding an O-FUT polypeptide, or a By-Pass (BPS) polypeptide, or a SIZ1 polypeptide, or a bZIP-S polypeptide, or a SPA15-like polypeptide.

[0324] Performance of the methods of the invention gives plants grown under conditions of nutrient deficiency, particularly under conditions of nitrogen deficiency, increased yield relative to control plants grown under comparable conditions. Therefore, according to the present invention, there is provided a method for increasing yield in plants grown under conditions of nutrient deficiency, which method comprises modulating expression in a plant of a nucleic acid encoding an O-FUT polypeptide, or a By-Pass (BPS) polypeptide, or a SIZ1 polypeptide, or a bZIP-S polypeptide, or a SPA15-like polypeptide.

[0325] Performance of the methods of the invention gives plants grown under conditions of salt stress, increased yield relative to control plants grown under comparable conditions. Therefore, according to the present invention, there is provided a method for increasing yield in plants grown under conditions of salt stress, which method comprises modulating expression in a plant of a nucleic acid encoding an O-FUT polypeptide, or a By-Pass (BPS) polypeptide, or a SIZ1 polypeptide, or a bZIP-S polypeptide, or a SPA15-like polypeptide.

[0326] The invention also provides genetic constructs and vectors to facilitate introduction and/or expression in plants of nucleic acids encoding O-FUT polypeptides, or By-Pass (BPS) polypeptides, or SIZ1 polypeptides, or bZIP-S polypeptides, or SPA15-like polypeptides.

[0327] The gene constructs may be inserted into vectors, which may be commercially available, suitable for transforming into plants and suitable for expression of the gene of interest in the transformed cells. The invention also provides use of a gene construct as defined herein in the methods of the invention.

[0328] More specifically, the present invention provides a construct comprising:
[0329] (a) a nucleic acid encoding an O-FUT polypeptide, or a By-Pass (BPS) polypeptide, or a SIZ1 polypeptide, or a bZIP-S polypeptide, or a SPA15-like polypeptide as defined above;
[0330] (b) one or more control sequences capable of driving expression of the nucleic acid sequence of (a); and optionally
[0331] (c) a transcription termination sequence.

[0332] Preferably, the nucleic acid encoding an O-FUT polypeptide, or a By-Pass (BPS) polypeptide, or a SIZ1 polypeptide, or a bZIP-S polypeptide, or a SPA15-like polypeptide is as defined above. The term “control sequence” and “termination sequence” are as defined herein.

[0333] Plants are transformed with a vector comprising any of the nucleic acids described above. The skilled artisan is well aware of the genetic elements that must be present on the vector in order to successfully transform, select and propagate host cells containing the sequence of interest. The sequence of interest is operably linked to one or more control sequences (at least to a promoter).

[0334] Concerning O-FUT polypeptides, or By-Pass (BPS) polypeptides, advantageously, any type of promoter, whether natural or synthetic, may be used to drive expression of the nucleic acid sequence, but preferably the promoter is of plant origin. A constitutive promoter is particularly useful in the methods. Preferably the constitutive promoter is a ubiquitous constitutive promoter of medium strength. See the “Definitions” section herein for definitions of the various promoter types. Also useful in the methods of the invention is a root-specific promoter.

[0335] Concerning SIZ1 polypeptides, or bZIP-S polypeptides, or SPA15-like polypeptides, advantageously, any type of promoter, whether natural or synthetic, may be used to drive expression of the nucleic acid sequence, but preferably the promoter is of plant origin. A constitutive promoter is particularly useful in the methods. Preferably the constitutive promoter is a ubiquitous constitutive promoter of medium strength. See the “Definitions” section herein for definitions of the various promoter types.

[0336] Concerning O-FUT-like polypeptides, it should be clear that the applicability of the present invention is not restricted to the O-FUT polypeptide-encoding nucleic acid represented by SEQ ID NO: 1, nor is the applicability of the invention restricted to expression of a O-FUT polypeptide-encoding nucleic acid when driven by a constitutive promoter.

[0337] The constitutive promoter is preferably a medium strength promoter, more preferably selected from a plant derived promoter, such as a GOS2 promoter, more preferably is the promoter GOS2 promoter from rice. Further preferably the constitutive promoter is represented by a nucleic acid sequence substantially similar to SEQ ID NO: 264, most preferably the constitutive promoter is as represented by SEQ ID NO: 264. See the “Definitions” section herein for further examples of constitutive promoters.

[0338] Optionally, one or more terminator sequences may be used in the construct introduced into a plant. Preferably, the construct comprises an expression cassette comprising a GOS2 promoter, substantially similar to SEQ ID NO: 264, and the nucleic acid encoding the O-FUT polypeptide. Furthermore, one or more sequences encoding selectable markers may be present on the construct introduced into a plant.

[0339] Concerning By-Pass (BPS) polypeptides, it should be clear that the applicability of the present invention is not restricted to the BPS polypeptide-encoding nucleic acid represented by SEQ ID NO: 267, nor is the applicability of the invention restricted to expression of a BPS polypeptide-encoding nucleic acid when driven by a constitutive promoter.

[0340] The constitutive promoter is preferably a medium strength promoter, more preferably selected from a plant derived promoter, such as a GOS2 promoter, more preferably is the promoter GOS2 promoter from rice. Further preferably the constitutive promoter is represented by a nucleic acid sequence substantially similar to SEQ ID NO: 350, most preferably the constitutive promoter is as represented by SEQ ID NO: 350. See the “Definitions” section herein for further examples of constitutive promoters.

[0341] Optionally, one or more terminator sequences may be used in the construct introduced into a plant. Preferably, the construct comprises an expression cassette comprising a GOS2 promoter, substantially similar to SEQ ID NO: 350, and the nucleic acid encoding the BPS polypeptide. Furthermore, one or more sequences encoding selectable markers may be present on the construct introduced into a plant.

[0342] Concerning SIZ1 polypeptides, it should be clear that the applicability of the present invention is not restricted to the SIZ1 polypeptide-encoding nucleic acid represented by SEQ ID NO: 353, nor is the applicability of the invention restricted to expression of a SIZ1 polypeptide-encoding nucleic acid when driven by a constitutive promoter.

[0343] The constitutive promoter is preferably a medium strength promoter, more preferably selected from a plant derived promoter, such as a GOS2 promoter, more preferably is the promoter GOS2 promoter from rice. Further preferably the constitutive promoter is represented by a nucleic acid sequence substantially similar to SEQ ID NO: 418, most preferably the constitutive promoter is as represented by SEQ ID NO: 418. See the “Definitions” section herein for further examples of constitutive promoters.

[0344] Optionally, one or more terminator sequences may be used in the construct introduced into a plant. Preferably, the construct comprises an expression cassette comprising a GOS2 promoter, substantially similar to SEQ ID NO: 418, and the nucleic acid encoding the SIZ1 polypeptide.

[0345] Concerning bZIP-S polypeptides, it should be clear that the applicability of the present invention is not restricted to the bZIP-S polypeptide-encoding nucleic acid represented by SEQ ID NO: 421, nor is the applicability of the invention restricted to expression of a bZIP-S polypeptide-encoding nucleic acid when driven by a constitutive promoter.

[0346] The constitutive promoter is preferably a medium strength promoter, more preferably selected from a plant derived promoter, such as a GOS2 promoter, more preferably is the promoter GOS2 promoter from rice. Further preferably the constitutive promoter is represented by a nucleic acid sequence substantially similar to SEQ ID NO: 629, most preferably the constitutive promoter is as represented by SEQ ID NO: 629. See the “Definitions” section herein for further examples of constitutive promoters.

[0347] Preferably the bZIP-S nucleic acid used in the invention is any of the nucleic acids of Table A linked to a GOS2 promoter.

[0348] Concerning SPA15-like polypeptides, it should be clear that the applicability of the present invention is not restricted to the SPA15-like polypeptide-encoding nucleic acid represented by SEQ ID NO: 633, nor is the applicability of the invention restricted to expression of a SPA15-like polypeptide-encoding nucleic acid when driven by a constitutive promoter.

[0349] The constitutive promoter is preferably a medium strength promoter, more preferably selected from a plant derived promoter, such as a GOS2 promoter, more preferably is the promoter GOS2 promoter from rice. Further preferably the constitutive promoter is represented by a nucleic acid sequence substantially similar to SEQ ID NO: 700, most preferably the constitutive promoter is as represented by SEQ ID NO: 700. See the “Definitions” section herein for further examples of constitutive promoters.

[0350] Optionally, one or more terminator sequences may be used in the construct introduced into a plant. Preferably, the construct comprises an expression cassette comprising a rice promoter, substantially similar to SEQ ID NO: 700, and the nucleic acid encoding the SPA15-like polypeptide. Furthermore, one or more sequences encoding selectable markers may be present on the construct introduced into a plant.

[0351] According to a preferred feature of the invention, the modulated expression is increased expression. Methods for increasing expression of nucleic acids or genes, or gene products, are well documented in the art and examples are provided in the definitions section.

[0352] As mentioned above, a preferred method for modulating expression of a nucleic acid encoding an O-FUT polypeptide, or a By-Pass (BPS) polypeptide, or a SIZ1 polypeptide, or a bZIP-S polypeptide, or a SPA15-like polypeptide is by introducing and expressing in a plant a nucleic acid encoding an O-FUT polypeptide, or a By-Pass (BPS) polypeptide, or a SIZ1 polypeptide, or a bZIP-S polypeptide, or a SPA15-like polypeptide, however the effects of performing the method, i.e. enhancing yield-related traits may also be achieved using other well known techniques, including but not limited to T-DNA activation tagging, TILLING, homologous recombination. A description of these techniques is provided in the definitions section.

[0353] The invention also provides a method for the production of transgenic plants having enhanced yield-related traits relative to control plants, comprising introduction and expression in a plant of any nucleic acid encoding an O-FUT polypeptide, or a By-Pass (BPS) polypeptide, or a SIZ1 polypeptide, or a bZIP-S polypeptide, or a SPA15-like polypeptide, as defined hereinabove.

[0354] More specifically, the present invention provides a method for the production of transgenic plants having enhanced yield-related traits, particularly increased seed yield, which method comprises:
[0355] (i) introducing and expressing in a plant or plant cell an O-FUT polypeptide, or a By-Pass (BPS) polypeptide, or a SIZ1 polypeptide, or a bZIP-S polypeptide, or a SPA15-like polypeptide-encoding nucleic acid; and
[0356] (ii) cultivating the plant cell under conditions promoting plant growth and development.

[0357] The nucleic acid of (i) may be any of the nucleic acids capable of encoding an O-FUT polypeptide, or a By-Pass (BPS) polypeptide, or a SIZ1 polypeptide, or a bZIP-S polypeptide, or a SPA15-like polypeptide, as defined herein.

[0358] The nucleic acid may be introduced directly into a plant cell or into the plant itself (including introduction into a tissue, organ or any other part of a plant). According to a preferred feature of the present invention, the nucleic acid is preferably introduced into a plant by transformation. The term “transformation” is described in more detail in the “definitions” section herein.

[0359] The present invention clearly extends to any plant cell or plant produced by any of the methods described herein, and to all plant parts and propagules thereof. The present invention encompasses plants or parts thereof (including seeds) obtainable by the methods according to the present invention. The plants or parts thereof comprise a nucleic acid transgene encoding an O-FUT polypeptide, or a By-Pass (BPS) polypeptide, or a SIZ1 polypeptide, or a bZIP-S polypeptide, or a SPA15-like polypeptide, as defined above. The present invention extends further to encompass the progeny of a primary transformed or transfected cell, tissue, organ or whole plant that has been produced by any of the aforementioned methods, the only requirement being that progeny exhibit the same genotypic and/or phenotypic characteristic(s) as those produced by the parent in the methods according to the invention.

[0360] The invention also includes host cells containing an isolated nucleic acid encoding an O-FUT polypeptide, or a By-Pass (BPS) polypeptide, or a SIZ1 polypeptide, or a bZIP-S polypeptide, or a SPA15-like polypeptide, as defined hereinabove. Preferred host cells according to the invention are plant cells. Host plants for the nucleic acids or the vector used in the method according to the invention, the expression cassette or construct or vector are, in principle, advantageously all plants, which are capable of synthesizing the polypeptides used in the inventive method.

[0361] The methods of the invention are advantageously applicable to any plant. Plants that are particularly useful in the methods of the invention include all plants which belong to the superfamily Viridiplantae, in particular monocotyledonous and dicotyledonous plants including fodder or forage legumes, ornamental plants, food crops, trees or shrubs. According to a preferred embodiment of the present invention, the plant is a crop plant. Examples of crop plants include soybean, sugarbeet, sunflower, canola, alfalfa, rapeseed, linseed, cotton, tomato, potato and tobacco. Further preferably, the plant is a monocotyledonous plant. Examples of monocotyledonous plants include sugarcane. More preferably the plant is a cereal. Examples of cereals include rice, maize, wheat, barley, millet, rye, triticale, sorghum, emmer, spelt, secale, einkorn, teff, milo and oats.

[0362] The invention also extends to harvestable parts of a plant such as, but not limited to seeds, leaves, fruits, flowers, stems, roots, rhizomes, tubers and bulbs, which harvestable parts comprise a recombinant nucleic acid encoding an O-FUT polypeptide, or a By-Pass (BPS) polypeptide, or a SIZ1 polypeptide, or a bZIP-S polypeptide, or a SPA15-like polypeptide.

[0363] The invention furthermore relates to products derived, preferably directly derived, from a harvestable part of such a plant, such as dry pellets or powders, oil, fat and fatty acids, starch or proteins.

[0364] The present invention also encompasses use of nucleic acids encoding O-FUT polypeptides, or By-Pass (BPS) polypeptides, or SIZ1 polypeptides, or bZIP-S polypeptides, or SPA15-like polypeptides as described herein and use of these O-FUT polypeptides, or By-Pass (BPS) polypeptides, or SIZ1 polypeptides, or bZIP-S polypeptides, or SPA15-like polypeptides in enhancing any of the aforementioned yield-related traits in plants. For example, nucleic acids encoding O-FUT polypeptide, or By-Pass (BPS) polypeptide, or SIZ1 polypeptide, or bZIP-S polypeptide, or SPA15-like polypeptide described herein, or the O-FUT polypeptides, or By-Pass (BPS) polypeptides, or SIZ1 polypeptides, or bZIP-S polypeptides, or SPA15-like polypeptides themselves, may find use in breeding programmes in which a DNA marker is identified which may be genetically linked to an O-FUT polypeptide, or a By-Pass (BPS) polypeptide, or a SIZ1 polypeptide, or a bZIP-S polypeptide, or a SPA15-like polypeptide-encoding gene. The nucleic acids/genes, or the O-FUT polypeptides, or By-Pass (BPS) polypeptides, or SIZ1 polypeptides, or bZIP-S polypeptides, or SPA15-like polypeptides themselves may be used to define a molecular marker. This DNA or protein marker may then be used in breeding programmes to select plants having enhanced yield-related traits as defined hereinabove in the methods of the invention. Furthermore, allelic variants of an O-FUT polypeptide, or a By-Pass (BPS) polypeptide, or a SIZ1 polypeptide, or a bZIP-S polypeptide, or a SPA15-like polypeptide-encoding nucleic acid/gene may find use in marker-assisted breeding programmes. Nucleic acids encoding O-FUT polypeptides, or By-Pass (BPS) polypeptides, or SIZ1 polypeptides, or bZIP-S polypeptides, or SPA15-like polypeptides may also be used as probes for genetically and physically mapping the genes that they are a part of, and as markers for traits linked to those genes. Such information may be useful in plant breeding in order to develop lines with desired phenotypes.

### Items.

### 1. O-FUT Polypeptides

[0365] 1. A method for enhancing yield-related traits in plants relative to control plants, comprising modulating expression in a plant of a nucleic acid encoding an O-FUT polypeptide, wherein said O-FUT polypeptide comprises a domain with a PFam accession number PF10250.
[0366] 2. Method, according to item 1, wherein said O-FUT polypeptide comprises one or more of the following motifs:

| (SEQ ID NO: 261) | |
|---|---|
| (i) | Motif 1: HYIALHLRYEKDM, |
| (SEQ ID NO: 262) | |
| (ii) | Motif 2: IYIVAGEIYGGHSMD, |
| (SEQ ID NO: 263) | |
| (iii) | Motif 3: ALDYNVAVQSDVFVYTYDGNMAKAVQGH |

[0367] 3. Method, according to item 1 or 2, wherein said O-FUT polypeptide may comprise a conserved Arginine residue in Motif 1.
[0368] 4. Method, according to any of the items 1 to 3, wherein said modulated expression is effected by introducing and expressing in a plant a nucleic acid encoding a O-FUT polypeptide.
[0369] 5. Method according to any one of items 1 to 4, wherein said nucleic acid encoding an O-FUT polypeptide encodes any one of the proteins listed in Table A or is a portion of such a nucleic acid, or a nucleic acid capable of hybridising with such a nucleic acid.
[0370] 6. Method according to any one of items 1 to 5, wherein said nucleic acid sequence encodes an orthologue or paralogue of any of the proteins given in Table A1.
[0371] 7. Method according to any preceding item, wherein said enhanced yield-related traits comprise increased yield, preferably increased biomass and/or increased seed yield relative to control plants.
[0372] 8. Method according to any one of items 1 to 7, wherein said enhanced yield-related traits are obtained under non-stress conditions.
[0373] 9. Method according to any one of items 1 to 7, wherein said enhanced yield-related traits are obtained under conditions of drought stress, salt stress or nitrogen deficiency.
[0374] 10. Method according to any one of items 1 to 9, wherein said nucleic acid is operably linked to a constitutive promoter, preferably to a GOS2 promoter, most preferably to a GOS2 promoter from rice.
[0375] 11. Method according to any one of items 1 to 10, wherein said nucleic acid encoding a O-FUT polypeptide is of any origin, preferably of plant origin, more preferably from a monocotyledonous plant, further preferably from the family Poaceae, particularly preferably from the genus Oryza, most preferably from Oryza sativa.
[0376] 12. Plant or part thereof, including seeds, obtainable by a method according to any one of items 1 to 11, wherein said plant or part thereof comprises a recombinant nucleic acid encoding a O-FUT polypeptide.
[0377] 13. Construct comprising:
   [0378] (i) nucleic acid encoding a O-FUT polypeptide as defined in any of the items 1 to 3;
   [0379] (ii) one or more control sequences capable of driving expression of the nucleic acid sequence of (a); and optionally
   [0380] (iii) a transcription termination sequence.
[0381] 14. Construct according to item 13, wherein one of said control sequences is a constitutive promoter, preferably a GOS2 promoter, most preferably a GOS2 promoter from rice.
[0382] 15. Use of a construct according to item 13 or 14 in a method for making plants having increased yield, particularly increased biomass and/or increased seed yield relative to control plants.
[0383] 16. An isolated nucleic acid molecule selected from:
   [0384] (i) a nucleic acid represented by SEQ ID NO: 1;
   [0385] (ii) the complement of a nucleic acid represented by SEQ ID NO: 1;
   [0386] (iii) a nucleic acid encoding the polypeptide as represented by SEQ ID NO: 2, preferably as a result of the degeneracy of the genetic code, said isolated nucleic acid can be derived from a polypeptide sequence as represented by SEQ ID NO: 2 and further preferably confers enhanced yield-related traits relative to control plants;
   [0387] (iv) a nucleic acid having, in increasing order of preference at least 30%, 31%, 32%, 33%, 34%, 35%, 36%, 37%, 38%, 39%, 40%, 41%, 42%, 43%, 44%, 45%, 46%, 47%, 48%, 49%, 50%, 51%, 52%, 53%, 54%, 55%, 56%, 57%, 58%, 59%, 60%, 61%, 62%, 63%, 64%, 65%, 66%, 67%, 68%, 69%, 70%, 71%, 72%, 73%, 74%, 75%, 76%, 77%, 78%, 79%, 80%, 81%, 82%, 83%, 84%, 85%, 86%, 87%, 88%, 89%, 90%, 91%, 92%, 93%, 94%, 95%, 96%, 97%, 98%, or 99% sequence identity with any of the nucleic acid sequences of table A1 and further preferably conferring enhanced yield-related traits relative to control plants;
   [0388] (v) a nucleic acid molecule which hybridizes with a nucleic acid molecule of (i) to (iv) under stringent hybridization conditions and preferably confers enhanced yield-related traits relative to control plants;
   [0389] (vi) a nucleic acid encoding a O-FUT polypeptide having, in increasing order of preference, at least 50%, 51%, 52%, 53%, 54%, 55%, 56%, 57%, 58%, 59%, 60%, 61%, 62%, 63%, 64%, 65%, 66%, 67%, 68%, 69%, 70%, 71%, 72%, 73%, 74%, 75%, 76%, 77%, 78%, 79%, 80%, 81%, 82%, 83%, 84%, 85%, 86%, 87%, 88%, 89%, 90%, 91%, 92%, 93%, 94%, 95%, 96%, 97%, 98%, or 99% sequence identity to the amino acid sequence represented by SEQ ID NO: 2 and any of the other amino acid sequences in Table A1 and preferably conferring enhanced yield-related traits relative to control plants.
[0390] 17. An isolated polypeptide selected from:
   [0391] (i) an amino acid sequence represented by SEQ ID NO: 2;
   [0392] (ii) an amino acid sequence having, in increasing order of preference, at least 50%, 51%, 52%, 53%, 54%, 55%, 56%, 57%, 58%, 59%, 60%, 61%, 62%, 63%, 64%, 65%, 66%, 67%, 68%, 69%, 70%, 71%, 72%, 73%, 74%, 75%, 76%, 77%, 78%, 79%, 80%, 81%, 82%, 83%, 84%, 85%, 86%, 87%, 88%, 89%, 90%, 91%, 92%, 93%, 94%, 95%, 96%, 97%, 98%, or 99% sequence identity to the amino acid sequence represented by any one of SEQ ID NO: 2 or 22 and any of the other amino acid sequences in Table A1 and preferably conferring enhanced yield-related traits relative to control plants.
   [0393] (iii) derivatives of any of the amino acid sequences given in (i) or (ii) above.
[0394] 18. Plant, plant part or plant cell transformed with a construct according to item 13 or 14.
[0395] 19. Method for the production of a transgenic plant having increased yield, particularly increased biomass and/or increased seed yield relative to control plants, comprising:
   [0396] (i) introducing and expressing in a plant a nucleic acid encoding an O-FUT polypeptide as defined in any of the items 1 to 3; and
   [0397] (ii) cultivating the plant cell under conditions promoting plant growth and development.
[0398] 20. Transgenic plant having increased yield, particularly increased biomass and/or increased seed yield, relative to control plants, resulting from modulated expression of a nucleic acid encoding an O-FUT polypeptide as defined in any of the items 1 to 3, or a transgenic plant cell derived from said transgenic plant.
[0399] 21. Transgenic plant according to item 12, 18 or 20, or a transgenic plant cell derived thereof, wherein said plant is a crop plant such as sugarbeet, or a monocot such as sugarcane, or a cereal, such as rice, maize, wheat, barley, millet, rye, triticale, sorghum emmer, spelt, secale, einkorn, teff, milo and oats.
[0400] 22. Harvestable parts of a plant according to item 21, wherein said harvestable parts are preferably shoot biomass and/or seeds.
[0401] 23. Products derived from a plant according to item 21 and/or from harvestable parts of a plant according to item 22.
[0402] 24. Use of a nucleic acid encoding a O-FUT polypeptide in increasing yield, particularly in increasing seed yield and/or shoot biomass in plants, relative to control plants.

### 2. By-Pass (BPS) Polypeptides

[0403] 25. A method for enhancing yield-related traits in plants relative to control plants, comprising modulating expression in a plant of a nucleic acid encoding a BPS polypeptide.
[0404] 26. A method, according with item 25, wherein said BPS polypeptide further comprises at least one of the following motifs:

(SEQ ID NO: 341)

| | |
|---|---|
| (i) | Motif 4: SWM[KT][LQ]A[MI]ESLC[EA][TI]H[TN] |
| | DIKTLIT[DE]LELP |

(SEQ ID NO: 342)

| | |
|---|---|
| (ii) | Motif 5: D[IL]C[IN]AFSSE[LI][ST]RLNQGHL[LY] |
| | L[QK]C[AV]LHNL[DE][SG]SS |

(SEQ ID NO: 343)

| | |
|---|---|
| (iii) | Motif 6: GKVLM[RQ]A[ML]YGV[KR]V[VQ]TV[FY] |
| | [IV]CS[VI]FA[AV]AFSGS |

[0405] 27. Method according to any of the items 25 or 26, wherein said BPS polypeptide further comprises at least one or more of the following motifs:

(SEQ ID NO: 344)

| | |
|---|---|
| (i) | Motif 7: SWM[KT][LQ]A[MI]ESLC[EA][TI]H[NT]D |
| | [IV]KTLIT[DE]LELPVSDW[DE][ED]KW[IV]DVYLD |
| | [IN]SVKL |

(SEQ ID NO: 345)

| | |
|---|---|
| (ii) | Motif 8: SL[ND]LPK[VI]KNSAKGKVLM[RQ]A[ML] |
| | YGV[KR]V[QV]TV[FY][IV]CSVFA[AV]AFSGS |

(SEQ ID NO: 346)

| | |
|---|---|
| (iii) | Motif 9: PQ[ED]P[HP]R[PS]F[FL]PFGNPF |

[0406] 28. Method according to any of the items 25 to 27, wherein said BPS polypeptide further comprises one or more of the following motifs:

(SEQ ID NO: 347)

| | |
|---|---|
| (i) | Motif 10: [VM]PK[EDN]K[SDN][DQ]ILT[LV]SWM |
| | [KS][QL]AM[EA]SLC[EQ]TH[KN][NAS]I[KNR]TL |
| | [IV]TDL[EQ]LPVSD[WL]E[ED][KN][WF][VI][DY] |
| | [IV]Y |

(SEQ ID NO: 348)

| | |
|---|---|
| (ii) | Motif 11: LPK[VK]KNSAKGKVL[ML]RA[LF]YGVKV |
| | [KQ]T[LV]YI[CS][SG]VF[AT]AA[FW]S[GD]S[ST] |
| | [NQK][ND]L[FL][YD][LV][TP][VI][SP][NE][EK] |

(SEQ ID NO: 349)

| | |
|---|---|
| (iii) | Motif 12: [PL]WA[KQP][SVA]F[MT][DE][MLV]Q |
| | [NS][TV][VM]N[AGPS]EI[KR][ND][IM][FL][LS]S |
| | [DG][GR][LFS]T[VI][LIM]K[ED]LE[AS]V[DE][AS] |
| | [GS]V[KE][KQ]L[YA][PT][AM][IV]Q[DQE]G[SV] |

[0407] 29. Method according to any of the items 25 to 28, wherein said modulated expression is effected by introducing and expressing in a plant a nucleic acid encoding a BPS polypeptide.
[0408] 30. Method according to any one of items 25 to 29, wherein said nucleic acid encoding a BPS polypeptide encodes any one of the proteins listed in Table A2 or is a portion of such a nucleic acid, or a nucleic acid capable of hybridising with such a nucleic acid.
[0409] 31. Method according to any one of items 25 to 30, wherein said nucleic acid sequence encodes an orthologue or paralogue of any of the proteins given in Table A2.
[0410] 32. Method according to any preceding items, wherein said enhanced yield-related traits comprise increased yield, preferably increased biomass and/or increased seed yield relative to control plants.
[0411] 33. Method according to any one of items 25 to 32, wherein said enhanced yield-related traits are obtained under non-stress conditions.
[0412] 34. Method according to any one of items 25 to 32, wherein said enhanced yield-related traits are obtained under conditions of a type of stress affecting the plant fertility.
[0413] 35. Method according to any one of items 25 to 34, wherein said nucleic acid is operably linked to a promoter active in roots.
[0414] 36. Method according to any one of items 25 to 34, wherein said nucleic acid is operably linked to a constitutive promoter, preferably to a GOS2 promoter, most preferably to a GOS2 promoter from rice.
[0415] 37. Method according to any one of items 25 to 36, wherein said nucleic acid encoding a BPS polypeptide is of plant origin, preferably from a dicotyledonous plant, further preferably from the family Brassicaceae, more preferably from the genus Arabidopsis, most preferably from Arabidopsis thaliana.
[0416] 38. Plant or part thereof, including seeds, obtainable by a method according to any one of items 25 to 37, wherein said plant or part thereof comprises a recombinant nucleic acid encoding a BPS polypeptide.
[0417] 39. Construct comprising:
   [0418] (i) nucleic acid encoding a BPS polypeptide as defined in any of the items 25 to 27;
   [0419] (ii) one or more control sequences capable of driving expression of the nucleic acid sequence of (a); and optionally
   [0420] (iii) a transcription termination sequence.
[0421] 40. Construct according to item 39, wherein one of said control sequences is a promoter active in roots.
[0422] 41. Construct according to item 39, wherein one of said control sequences is a constitutive promoter, preferably a GOS2 promoter, most preferably a GOS2 promoter from rice.
[0423] 42. Use of a construct according to any of the items 39 to 41 in a method for making plants having increased yield, particularly increased biomass and/or increased seed yield relative to control plants.
[0424] 43. Plant, plant part or plant cell transformed with a construct according to any of the items 39 to 41.
[0425] 44. Method for the production of a transgenic plant having increased yield, particularly increased biomass and/or increased seed yield relative to control plants, comprising:
   [0426] (i) introducing and expressing in a plant a nucleic acid encoding a BPS polypeptide as defined in any of the items 25 to 28; and
   [0427] (ii) cultivating the plant cell under conditions promoting plant growth and development.
[0428] 45. Transgenic plant having increased yield, particularly increased biomass and/or increased seed yield, relative to control plants, resulting from modulated expression of a nucleic acid encoding a BPS polypeptide as defined in any of the items 25 to 28, or a transgenic plant cell derived from said transgenic plant.
[0429] 46. Transgenic plant according to item 38, 43 or 45, or a transgenic plant cell derived thereof, wherein said plant is a crop plant such as sugarbeet, or a monocot such as sugarcane, or a cereal, such as rice, maize, wheat, barley, millet, rye, triticale, sorghum emmer, spelt, secale, einkorn, teff, milo and oats.
[0430] 47. Harvestable parts of a plant according to item 46, wherein said harvestable parts are preferably shoot biomass and/or seeds.
[0431] 48. Products derived from a plant according to item 46 and/or from harvestable parts of a plant according to item 47.
[0432] 49. Use of a nucleic acid encoding a BPS polypeptide in increasing yield, particularly in increasing seed yield and/or shoot biomass in plants, relative to control plants.

### 3. SIZ1 Polypeptides

[0433] 50. A method for enhancing yield-related traits in plants relative to control plants, comprising modulating expression in a plant of a nucleic acid encoding a SIZ1 polypeptide, wherein said SIZ1 polypeptide comprises a DUF206 domain.
[0434] 51. Method according to item 50, wherein said SIZ1 polypeptide comprises one or more of the following motifs:

| (SEQ ID NO: 409) | |
|---|---|
| (i) | Motif 13: MSCNGCRXLRKGCX, |
| (SEQ ID NO: 410) | |
| (ii) | Motif 14: QXXATXFXAKFXGR, |
| (SEQ ID NO: 411) | |
| (iii) | Motif 15: FXSLLXEAXG |

[0435] 52. Method according to item 50 or 51, wherein said modulated expression is effected by introducing and expressing in a plant a nucleic acid encoding a SIZ1 polypeptide.
[0436] 53. Method according to any one of items 50 to 52, wherein said nucleic acid encoding a SIZ1 polypeptide encodes any one of the proteins listed in Table A3 or is a portion of such a nucleic acid, or a nucleic acid capable of hybridising with such a nucleic acid.
[0437] 54. Method according to any one of items 50 to 53, wherein said nucleic acid sequence encodes an orthologue or paralogue of any of the proteins given in Table A3.
[0438] 55. Method according to any preceding item, wherein said enhanced yield-related traits comprise increased yield, preferably increased biomass and/or increased seed yield relative to control plants.
[0439] 56. Method according to any one of items 50 to 55, wherein said enhanced yield-related traits are obtained under non-stress conditions.
[0440] 57. Method according to any one of items 50 to 55, wherein said enhanced yield-related traits are obtained under conditions of drought stress, salt stress or nitrogen deficiency.
[0441] 58. Method according to any one of items 52 to 57, wherein said nucleic acid is operably linked to a constitutive promoter, preferably to a GOS2 promoter, most preferably to a GOS2 promoter from rice.
[0442] 59. Method according to any one of items 50 to 58, wherein said nucleic acid encoding a SIZ1 polypeptide is of plant origin, preferably from a dicotyledonous plant, further preferably from the family Brassicaceae, more preferably from the genus Arabidopsis, most preferably from Arabidopsis thaliana.
[0443] 60. Plant or part thereof, including seeds, obtainable by a method according to any one of items 50 to 59, wherein said plant or part thereof comprises a recombinant nucleic acid encoding a SIZ1 polypeptide.
[0444] 61. Construct comprising:
   [0445] (i) nucleic acid encoding a SIZ1 polypeptide as defined in items 50 or 51;
   [0446] (ii) one or more control sequences capable of driving expression of the nucleic acid sequence of (a); and optionally
   [0447] (iii) a transcription termination sequence.
[0448] 62. Construct according to item 61, wherein one of said control sequences is a constitutive promoter, preferably a GOS2 promoter, most preferably a GOS2 promoter from rice.
[0449] 63. Use of a construct according to item 61 or 62 in a method for making plants having increased yield, particularly increased biomass and/or increased seed yield relative to control plants.
[0450] 64. Plant, plant part or plant cell transformed with a construct according to item 61 or 62.
[0451] 65. Method for the production of a transgenic plant having increased yield, particularly increased biomass and/or increased seed yield relative to control plants, comprising:
   [0452] (i) introducing and expressing in a plant a nucleic acid encoding a SIZ1 polypeptide as defined in item 50 or 51; and
   [0453] (ii) cultivating the plant cell under conditions promoting plant growth and development.
[0454] 66. Transgenic plant having increased yield, particularly increased biomass and/or increased seed yield, relative to control plants, resulting from modulated expression of a nucleic acid encoding a SIZ1 polypeptide as defined in item 50 or 51, or a transgenic plant cell derived from said transgenic plant.
[0455] 67. Transgenic plant according to item 60, 64 or 66, or a transgenic plant cell derived thereof, wherein said plant is a crop plant such as sugarbeet, or a monocot such as sugarcane or a cereal, such as rice, maize, wheat, barley, millet, rye, triticale, sorghum emmer, spelt, secale, einkorn, teff, milo and oats.
[0456] 68. Harvestable parts of a plant according to item 67, wherein said harvestable parts are preferably shoot biomass and/or seeds.
[0457] 69. Products derived from a plant according to item 67 and/or from harvestable parts of a plant according to item 68.
[0458] 70. Use of a nucleic acid encoding a SIZ1 polypeptide in increasing yield, particularly in increasing seed yield and/or shoot biomass in plants, relative to control plants.
   4. bZIP-S Polypeptides
[0459] 71. A method for enhancing yield-related traits in plants relative to control plants, comprising modulating expression in a plant of a nucleic acid encoding a bZIP-S polypeptide.
[0460] 72. Method according to item 71, wherein said bZIP-S polypeptide comprises one or more of the following motifs:
   [0461] (i) Motif 19 as represented by SEQ ID NO: 522;
   [0462] (ii) Motif 20 as represented by SEQ ID NO: 587;
   [0463] (iii) Motif 21 as represented by SEQ ID NO: 600.
[0464] 73. Method according to item 71 or 72, wherein said modulated expression is effected by introducing and expressing in a plant a nucleic acid encoding a bZIP-S polypeptide.
[0465] 74. Method according to any one of items 71 to 73, wherein said nucleic acid encoding a bZIP-S polypeptide encodes any one of the proteins listed in Table A4 or is a portion of such a nucleic acid, or a nucleic acid capable of hybridising with such a nucleic acid.
[0466] 75. Method according to any one of items 71 to 74, wherein said nucleic acid sequence encodes an orthologue or paralogue of any of the proteins given in Table A4.
[0467] 76. Method according to any preceding item, wherein said enhanced yield-related traits comprise increased seed yield relative to control plants.
[0468] 77. Method according to any one of items 71 to 76, wherein said enhanced yield-related traits are obtained under non-stress conditions.
[0469] 78. Method according to any one of items 71 to 76, wherein said enhanced yield-related traits are obtained under conditions of drought stress, salt stress or nitrogen deficiency.
[0470] 79. Method according to any one of items 73 to 78, wherein said nucleic acid is operably linked to a constitutive promoter, preferably to a GOS2 promoter, most preferably to a GOS2 promoter from rice.
[0471] 80. Method according to any one of items 71 to 79, wherein said nucleic acid encoding a bZIP-S polypeptide is of plant origin, preferably from a dicotyledonous plant, further preferably from a leguminous plant, more preferably from the genus Medicago, most preferably from Medicago truncatula.
[0472] 81. Plant or part thereof, including seeds, obtainable by a method according to any one of items 71 to 80, wherein said plant or part thereof comprises a recombinant nucleic acid encoding a bZIP-S polypeptide.
[0473] 82. Construct comprising:
   [0474] (i) nucleic acid encoding a bZIP-S polypeptide as defined in items 71 or 72;
   [0475] (ii) one or more control sequences capable of driving expression of the nucleic acid sequence of (a); and optionally
   [0476] (iii) a transcription termination sequence.
[0477] 83. Construct according to item 82, wherein one of said control sequences is a constitutive promoter, preferably a GOS2 promoter, most preferably a GOS2 promoter from rice.
[0478] 84. Use of a construct according to item 82 or 83 in a method for making plants having increased yield, particularly increased biomass and/or increased seed yield relative to control plants.
[0479] 85. Plant, plant part or plant cell transformed with a construct according to item 82 or 83.
[0480] 86. Method for the production of a transgenic plant having increased yield, particularly increased biomass and/or increased seed yield relative to control plants, comprising:
   [0481] (i) introducing and expressing in a plant a nucleic acid encoding a bZIP-S polypeptide as defined in item 71 or 72; and
   [0482] (ii) cultivating the plant cell under conditions promoting plant growth and development.
[0483] 87. Transgenic plant having increased yield, particularly increased biomass and/or increased seed yield, relative to control plants, resulting from modulated expression of a nucleic acid encoding a bZIP-S polypeptide as defined in item 71 or 72, or a transgenic plant cell derived from said transgenic plant.
[0484] 88. Transgenic plant according to item 81, 85 or 87, or a transgenic plant cell derived thereof, wherein said plant is a crop plant, such as beet or sugarbeet, or a monocot such as sugarcane or a cereal, such as rice, maize, wheat, barley, millet, rye, triticale, sorghum emmer, spelt, secale, einkorn, teff, milo and oats.
[0485] 89. Harvestable parts of a plant according to item 88, wherein said harvestable parts are preferably shoot biomass and/or seeds.
[0486] 90. Products derived from a plant according to item 88 and/or from harvestable parts of a plant according to item 89.
[0487] 91. Use of a nucleic acid encoding a bZIP-S polypeptide in increasing yield, particularly in increasing seed yield and/or shoot biomass in plants, relative to control plants.

### 5. SPA15-Like Polypeptides

[0488] 92. A method for enhancing yield-related traits in plants relative to control plants, comprising modulating expression in a plant of a nucleic acid encoding a SPA15-like polypeptide, wherein said SPA15-like polypeptide comprises an Armadillo-type fold domain with an InterPro accession number IPR016024 and SuperFamily accession number SSF48371 and a “winged helix” DNA-binding domain with a SuperFamily accession number SSF46785.
[0489] 93. Method according to item 92, wherein said SPA15-like polypeptide comprises one or more of the following motifs:

(SEQ ID NO: 691)
(i) Motif 22:
AAD[KR]HWSDGALEADLR[RL]ADF[RV][AV][KR][QR]RAMEDA
[LF]MAL[EK]F[VI]K[ND][IV]HDMMV[SN][KR][ML][YQ]
[KE];
(SEQ ID NO: 692)
(ii) Motif 23:
RA[RC]QDVA[IV]LGS[GE]FLKLDARAR[EK]DTEKID[RHN];
(SEQ ID NO: 693)
(iii) Motif 24:
L[SA]EA[DC]GIDY[TN]D[PA]E[EF][LV].

[0490] 94. Method according to any of the previous items, wherein said SPA15-like polypeptide comprises one or more of the following motifs:

(SEQ ID NO: 694)

| | |
|---|---|
| (i) | Motif 25: EADGIDYTDPEELELLV[AT]TLIDLDAMDGK |
| | [SG]S[VA]SLLAECSSSPDVNTR[KQ]AL; |

(SEQ ID NO: 695)

| | |
|---|---|
| (ii) | Motif 26: APSMW[TI]LGNAGMGALQRLA[EQ]DSN[PY] |
| | A[IV]A[AR]A; |

(SEQ ID NO: 696)

| | |
|---|---|
| (iii) | Motif 27: FPGEVS[TA]D[RQ]ITAI[QE]EAYW[SD]MA. |

[0491] 95. Method according to any of the previous items, wherein said SPA15-like polypeptide comprises one or more of the following motifs:

| (SEQ ID NO: 697) | |
|---|---|
| (i) | Motif 28: DGIDYTDPEELELLV[AT]TLIDLDAMDGK |
| | [KSR]S[VA]SL[LI]AECSSSPDVNTRKALAN; |
| (SEQ ID NO: 698) | |
| (ii) | Motif 29: PSMW[TI]LGNAGMGALQRLA[QE]D[SP]N |
| | [YP]A[VI]A[RA]AA[ST]RAI[ND][EA]L[KT]KQWE |
| | [LV]EEGDSLRF; |
| (SEQ ID NO: 699) | |
| (iii) | Motif 30: [GL][SV][ST]S[PER][AT][NG][ST] |
| | [TR][SDG][FR]I[TS]LEKNG[NKI][TA][LF][EG] |
| | [LF]FP[GH]EVS[TSA]D[QR]I[TSY]AIE[EQ]AY |
| | [WKQ]SMASA[LF]SEA. |

[0492] 96. Method according to any of the previous items, wherein said modulated expression is effected by introducing and expressing in a plant a nucleic acid encoding a SPA15-like polypeptide.
[0493] 97. Method according to any of the previous items, wherein said nucleic acid encoding a SPA15-like polypeptide encodes any one of the proteins listed in Table A5 or is a portion of such a nucleic acid, or a nucleic acid capable of hybridising with such a nucleic acid.
[0494] 98. Method according to any of the previous items, wherein said nucleic acid sequence encodes an orthologue or paralogue of any of the proteins given in Table A5.
[0495] 99. Method according to any of the previous items, wherein said enhanced yield-related traits comprise increased yield, preferably increased biomass and/or increased seed yield relative to control plants.
[0496] 100. Method according to item 99, wherein said enhanced yield-related traits are obtained under non-stress conditions.
[0497] 101. Method according to item 99, wherein said enhanced yield-related traits are obtained under conditions of drought stress, salt stress or nitrogen deficiency.
[0498] 102. Method according to any one of items 92 to 98, wherein said nucleic acid is operably linked to a constitutive promoter, preferably to a GOS2 promoter, most preferably to a GOS2 promoter from rice.
[0499] 103. Method according to item 102, wherein said nucleic acid encoding a SPA15-like polypeptide is of plant origin, preferably from a dicotyledonous plant, further preferably from the family Poaceae, more preferably from the genus Oryza, most preferably from Oryza sativa.
[0500] 104. Plant or part thereof, including seeds, obtainable by a method according to any one of items 92 to 101, wherein said plant or part thereof comprises a recombinant nucleic acid encoding a SPA15-like polypeptide.
[0501] 105. Construct comprising:
   [0502] (i) nucleic acid encoding a SPA15-like polypeptide as defined in any of the items 92 to 95;
   [0503] (ii) one or more control sequences capable of driving expression of the nucleic acid sequence of (a); and optionally
   [0504] (iii) a transcription termination sequence.
[0505] 106. Construct according to item 105, wherein one of said control sequences is a constitutive promoter, preferably a GOS2 promoter, most preferably a GOS2 promoter from rice.
[0506] 107. Use of a construct according to item 105 or 106 in a method for making plants having increased yield, particularly increased biomass and/or increased seed yield relative to control plants.
[0507] 108. Plant, plant part or plant cell transformed with a construct according to item 105 or 106.
[0508] 109. Method for the production of a transgenic plant having increased yield, particularly increased biomass and/or increased seed yield relative to control plants, comprising:
   [0509] (i) introducing and expressing in a plant a nucleic acid encoding a SPA15-like polypeptide as defined in any of the items 92 to 95; and
   [0510] (ii) cultivating the plant cell under conditions promoting plant growth and development.
[0511] 110. Transgenic plant having increased yield, particularly increased biomass and/or increased seed yield, relative to control plants, resulting from modulated expression of a nucleic acid encoding a SPA15-like polypeptide as defined in any of the items 92 to 95, or a transgenic plant cell derived from said transgenic plant.
[0512] 111. Transgenic plant according to any of the items 104, 108 or 110, or a transgenic plant cell derived thereof, wherein said plant is a crop plant, such as beet or sugarbeet, or a monocot such as sugarcane, or a cereal, such as rice, maize, wheat, barley, millet, rye, triticale, sorghum emmer, spelt, secale, einkorn, teff, milo and oats.
[0513] 112. Harvestable parts of a plant according to item 111, wherein said harvestable parts are preferably shoot biomass and/or seeds.
[0514] 113. Products derived from a plant according to item 111 and/or from harvestable parts of a plant according to item 112.
[0515] 114. Use of a nucleic acid encoding a SPA15-like polypeptide in increasing yield, particularly in increasing seed yield and/or shoot biomass in plants, relative to control plants.
[0516] 115. An isolated nucleic acid molecule selected from:
   [0517] (i) a nucleic acid represented by SEQ ID NO: 633;
   [0518] (ii) the complement of a nucleic acid represented by SEQ ID NO: 633;
   [0519] (iii) a nucleic acid encoding the polypeptide as represented by SEQ ID NO: 634, preferably as a result of the degeneracy of the genetic code, said isolated nucleic acid can be derived from a polypeptide sequence as represented by SEQ ID NO: 634, and further preferably confers enhanced yield-related traits relative to control plants;
   [0520] (iv) a nucleic acid having, in increasing order of preference at least 30%, 31%, 32%, 33%, 34%, 35%, 36%, 37%, 38%, 39%, 40%, 41%, 42%, 43%, 44%, 45%, 46%, 47%, 48%, 49%, 50%, 51%, 52%, 53%, 54%, 55%, 56%, 57%, 58%, 59%, 60%, 61%, 62%, 63%, 64%, 65%, 66%, 67%, 68%, 69%, 70%, 71%, 72%, 73%, 74%, 75%, 76%, 77%, 78%, 79%, 80%, 81%, 82%, 83%, 84%, 85%, 86%, 87%, 88%, 89%, 90%, 91%, 92%, 93%, 94%, 95%, 96%, 97%, 98%, or 99% sequence identity with any of the nucleic acid sequences of table A5 and further preferably conferring enhanced yield-related traits relative to control plants;
   [0521] (v) a nucleic acid molecule which hybridizes with a nucleic acid molecule of (i) to (iv) under stringent hybridization conditions and preferably confers enhanced yield-related traits relative to control plants;
   [0522] (vi) a nucleic acid encoding a SPA15-like polypeptide having, in increasing order of preference, at least 50%, 51%, 52%, 53%, 54%, 55%, 56%, 57%, 58%, 59%, 60%, 61%, 62%, 63%, 64%, 65%, 66%, 67%, 68%, 69%, 70%, 71%, 72%, 73%, 74%, 75%, 76%, 77%, 78%, 79%, 80%, 81%, 82%, 83%, 84%, 85%, 86%, 87%, 88%, 89%, 90%, 91%, 92%, 93%, 94%, 95%, 96%, 97%, 98%, or 99% sequence identity to the amino acid sequence represented by SEQ ID NO: 634, and any of the other amino acid sequences in Table A5 and preferably conferring enhanced yield-related traits relative to control plants.
[0523] 116. An isolated polypeptide selected from:
   [0524] (i) an amino acid sequence represented by SEQ ID NO: 634;
   [0525] (ii) an amino acid sequence having, in increasing order of preference, at least 50%, 51%, 52%, 53%, 54%, 55%, 56%, 57%, 58%, 59%, 60%, 61%, 62%, 63%, 64%, 65%, 66%, 67%, 68%, 69%, 70%, 71%, 72%, 73%, 74%, 75%, 76%, 77%, 78%, 79%, 80%, 81%, 82%, 83%, 84%, 85%, 86%, 87%, 88%, 89%, 90%, 91%, 92%, 93%, 94%, 95%, 96%, 97%, 98%, or 99% sequence identity to the amino acid sequence represented by SEQ ID NO: 634, and any of the other amino acid sequences in Table A5 and preferably conferring enhanced yield-related traits relative to control plants.
   [0526] (iii) derivatives of any of the amino acid sequences given in (i) or (ii) above.

### DESCRIPTION OF FIGURES

[0527] The present invention will now be described with reference to the following figures in which:

[0528] FIG. 1 represents an O-FUT polypeptide as represented by SEQ ID NO: 22 (full length), which comprises the following features: a Subcellular Targteting Sequence (STS), a TMHMM predicted transmembrane (TM) domain, a GDP-fucose protein O-fucosyltransferase with InterPro accession number IPR019378. The bold vertical illustrates the truncation site, the STS and TM being deleted in SEQ ID NO: 2.

[0529] FIG. 2 represents a multiple alignment of various O-FUT polypeptides. The InterPro IPR019378 domain is marked with XXX. These alignments can be used for defining further motifs, such as motifs 1 to 3 (boxed), when using conserved amino acids.

[0530] FIG. 3 shows phylogenetic tree of O-FUT polypeptides according to the method of Yves Van De Peer et al. (2009)—Plaza, a resource for plant comparative genomics (www.vib.gent.be).

[0531] FIG. 4 represents the binary vector used for increased expression in Oryza sativa of an O-FUT-encoding nucleic acid under the control of a rice GOS2 promoter (pGOS2)

[0532] FIG. 5 represents the gene structure of BPS.

[0533] FIG. 6 shows phylogenetic tree of selected BPS polypeptides, where the several clusters are identified: Trees, Fabales, Other Dicots, Solanales, Coniferales, Poales and Brassicales to which BPS belongs.

[0534] FIG. 7 represents the binary vector used for increased expression in Oryza sativa of a BPS-encoding nucleic acid under the control of a rice GOS2 promoter (pGOS2)

[0535] FIG. 8 represents the represents the overall structure of the SIZ1 polypeptides.

[0536] FIG. 9 shows a multiple sequence alignment of SIZ1 polypeptides.

[0537] FIG. 10 shows a phylogenetic tree of SIZ1 polypeptides. Class I includes organisms of any origin; Class II includes organisms such as H. vulgare TA46195 4513 f, O. sativa 0s05g0125000; Class III includes organisms such as A. thaliana AT5G60410.5 f and arabidopsisECsequence; Class IV includes organisms such as C. vulgaris 83729 f and AT5G41580 NP 198973.5EMB3001.

[0538] FIG. 11 represents the binary vector used for increased expression in Oryza sativa of a S1Z1-encoding nucleic acid under the control of a rice GOS2 promoter (pGOS2).

[0539] FIG. 12 represents a multiple alignment of various bZIP-S polypeptides. The region indicated with interrupted line of squared boxes corresponds to the bZIP domain. Boxed regions flanking the bzip domain comprised conserved sequences in polypeptides of the bZIP-S group. The name of SEQ ID NO 422 boxed. These alignments can be used for defining further motifs, when using conserved amino acids.

[0540] FIG. 13 represents the binary vector used for increased expression in Oryza sativa of a bZIP-S-encoding nucleic acid under the control of a rice GOS2 promoter (pGOS2).

[0541] FIG. 14 represents the domain structure of SEQ ID NO: 634 with conserved domains underlined: the Armadillo-type fold domain is double-underlined and the “winged helix” DNA-binding domain is once underlined.

[0542] FIG. 15 represents a multiple alignment of various SPA15-like polypeptides. These alignments can be used for defining further motifs, when using conserved amino acids. The conserved domains like the Armadillo-type fold domain, the “winged helix” DNA-binding domain and the conserved domain described in YAP et al. (2003) are indicated.

[0543] FIG. 16 shows phylogenetic tree of SPA15-like polypeptides.

[0544] FIG. 17 represents the binary vector used for increased expression in Oryza sativa of a SPA15-like-encoding nucleic acid under the control of a rice GOS2 promoter (pGOS2).

### EXAMPLES

[0545] The present invention will now be described with reference to the following examples, which are by way of illustration alone. The following examples are not intended to completely define or otherwise limit the scope of the invention.

[0546] DNA manipulation: unless otherwise stated, recombinant DNA techniques are performed according to standard protocols described in (Sambrook (2001) Molecular Cloning: a laboratory manual, 3rd Edition Cold Spring Harbor Laboratory Press, CSH, New York) or in Volumes 1 and 2 of Ausubel et al. (1994), Current Protocols in Molecular Biology, Current Protocols. Standard materials and methods for plant molecular work are described in Plant Molecular Biology Labfax (1993) by R. D. D. Croy, published by BIOS Scientific Publications Ltd (UK) and Blackwell Scientific Publications (UK).

### Example 1

### Identification of Sequences Related to the Nucleic Acid Sequence Used in the Methods of Intervention

### 1.1 O-FUT Polypeptides

[0547] Sequences (full length cDNA, ESTs or genomic) related to SEQ ID NO: 1 and SEQ ID NO: 2 were identified amongst those maintained in the Entrez Nucleotides database at the National Center for Biotechnology Information (NCBI) using database sequence search tools, such as the Basic Local Alignment Tool (BLAST) (Altschul et al. (1990) J. Mol. Biol. 215:403-410; and Altschul et al. (1997) Nucleic Acids Res. 25:3389-3402). The program is used to find regions of local similarity between sequences by comparing nucleic acid or polypeptide sequences to sequence databases and by calculating the statistical significance of matches. For example, the polypeptide encoded by the nucleic acid of SEQ ID NO: 1 was used for the TBLASTN algorithm, with default settings and the filter to ignore low complexity sequences set off. The output of the analysis was viewed by pairwise comparison, and ranked according to the probability score (E-value), where the score reflect the probability that a particular alignment occurs by chance (the lower the E-value, the more significant the hit). In addition to E-values, comparisons were also scored by percentage identity. Percentage identity refers to the number of identical nucleotides (or amino acids) between the two compared nucleic acid (or polypeptide) sequences over a particular length. In some instances, the default parameters may be adjusted to modify the stringency of the search. For example the E-value may be increased to show less stringent matches. This way, short nearly exact matches may be identified.

[0548] Table A1 provides a list of nucleic acid sequences related to SEQ ID NO: 1 and SEQ ID NO: 2.

TABLE A1
Examples of O-FUT nucleic acids and polypeptides:

| | Nucleic acid | Polypeptide |
|---|---|---|
| Name | SEQ ID NO: | SEQ ID NO: |
| Oryza sativa | 1 | 2 |
| OS01G63230 | 3 | 4 |
| AT1G04910 | 5 | 6 |
| AT1G11990 | 7 | 8 |
| AT1G14020 | 9 | 10 |
| AT1G14970 | 11 | 12 |
| AT1G20550 | 13 | 14 |
| AT1G22460 | 15 | 16 |
| AT2G01480 | 17 | 18 |
| AT2G03280 | 19 | 20 |
| AT2G37980 | 21 | 22 |
| AT2G44500 | 23 | 24 |
| AT3G02250 | 25 | 26 |
| AT3G03810 | 27 | 28 |
| AT3G07900 | 29 | 30 |
| AT3G26370 | 31 | 32 |
| AT3G30300 | 33 | 34 |
| AT3G54100 | 35 | 36 |
| AT4G16650 | 37 | 38 |
| AT4G24530 | 39 | 40 |
| AT4G38390 | 41 | 42 |
| AT5G01100 | 43 | 44 |
| AT5G15740 | 45 | 46 |
| AT5G35570 | 47 | 48 |
| AT5G63390 | 49 | 50 |
| AT5G64600 | 51 | 52 |
| AT5G65470 | 53 | 54 |
| CP00001G01680 | 55 | 56 |
| CP00036G00140 | 57 | 58 |
| CP00036G01730 | 59 | 60 |
| CP00051G01430 | 61 | 62 |
| CP00055G00270 | 63 | 64 |
| CP00056G00770 | 65 | 66 |
| CP00065G01500 | 67 | 68 |
| CP00152G00510 | 69 | 70 |
| CP00280G00020 | 71 | 72 |
| CP00289G00010 | 73 | 74 |
| CP00289G00050 | 75 | 76 |
| CP00382G00010 | 77 | 78 |
| CP00458G00010 | 79 | 80 |
| CP32528G00010 | 81 | 82 |
| CP33915G00010 | 83 | 84 |
| OS01G07410 | 85 | 86 |
| OS01G62390 | 87 | 88 |
| OS02G04590 | 89 | 90 |
| OS02G06400 | 91 | 92 |
| OS02G49460 | 93 | 94 |
| OS03G07310 | 95 | 96 |
| OS03G21090 | 97 | 98 |
| OS08G42550 | 99 | 100 |
| OS09G24570 | 101 | 102 |
| OS09G27080 | 103 | 104 |
| OS09G29940 | 105 | 106 |
| OS09G37590 | 107 | 108 |
| OS11G07510 | 109 | 110 |
| OS11G29120 | 111 | 112 |
| OS12G07540 | 113 | 114 |
| OS12G08820 | 115 | 116 |
| OS12G23760 | 117 | 118 |
| PP00008G00940 | 119 | 120 |
| PP00010G00860 | 121 | 122 |
| PP00011G00510 | 123 | 124 |
| PP00029G00760 | 125 | 126 |
| PP00044G01740 | 127 | 128 |
| PP00046G01420 | 129 | 130 |
| PP00047G01610 | 131 | 132 |
| PP00066G00650 | 133 | 134 |
| PP00075G00140 | 135 | 136 |
| PP00077G00040 | 137 | 138 |
| PP00077G00400 | 139 | 140 |
| PP00114G00970 | 141 | 142 |
| PP00131G00330 | 143 | 144 |
| PP00173G00050 | 145 | 146 |
| PP00204G00120 | 147 | 148 |
| PP00215G00250 | 149 | 150 |
| PP00284G00340 | 151 | 152 |
| PP00316G00300 | 153 | 154 |
| PP00376G00300 | 155 | 156 |
| PP00452G00050 | 157 | 158 |
| PT00G00080 | 159 | 160 |
| PT00G02000 | 161 | 162 |
| PT04G03650 | 163 | 164 |
| PT04G14110 | 165 | 166 |
| PT05G07220 | 167 | 168 |
| PT05G08390 | 169 | 170 |
| PT05G15970 | 171 | 172 |
| PT06G07850 | 173 | 174 |
| PT07G11820 | 175 | 176 |
| PT08G08310 | 177 | 178 |
| PT08G12170 | 179 | 180 |
| PT14G09920 | 181 | 182 |
| PT15G02530 | 183 | 184 |
| PT15G06760 | 185 | 186 |
| PT16G09540 | 187 | 188 |
| PT19G03390 | 189 | 190 |
| PT19G06190 | 191 | 192 |
| SB00G01560 | 193 | 194 |
| SB01G036540 | 195 | 196 |
| SB01G045900 | 197 | 198 |
| SB02G024540 | 199 | 200 |
| SB02G025960 | 201 | 202 |
| SB02G027470 | 203 | 204 |
| SB02G031900 | 205 | 206 |
| SB03G004640 | 207 | 208 |
| SB03G039450 | 209 | 210 |
| SB03G040020 | 211 | 212 |
| SB04G004090 | 213 | 214 |
| SB04G029280 | 215 | 216 |
| SB10G007565 | 217 | 218 |
| SB10G008680 | 219 | 220 |
| SB10G010460 | 221 | 222 |
| SB10G027900 | 223 | 224 |
| VV00G04590 | 225 | 226 |
| VV00G09305 | 227 | 228 |
| VV00G09320 | 229 | 230 |
| VV01G07570 | 231 | 232 |
| VV03G02980 | 233 | 234 |
| VV04G15360 | 235 | 236 |
| VV05G12490 | 237 | 238 |
| VV08G10900 | 239 | 240 |
| VV09G06300 | 241 | 242 |
| VV09G10190 | 243 | 244 |
| VV10G01620 | 245 | 246 |
| VV11G01110 | 247 | 248 |
| VV11G01120 | 249 | 250 |
| VV13G05630 | 251 | 252 |
| VV13G13260 | 253 | 254 |
| VV14G09190 | 255 | 256 |
| VV14G09220 | 257 | 258 |
| VV17G01580 | 259 | 260 |

[0549] Sequences have been tentatively assembled and publicly disclosed by research institutions, such as The Institute for Genomic Research (TIGR; beginning with TA). The Eukaryotic Gene Orthologs (EGO) database may be used to identify such related sequences, either by keyword search or by using the BLAST algorithm with the nucleic acid sequence or polypeptide sequence of interest. Special nucleic acid sequence databases have been created for particular organisms, such as by the Joint Genome Institute. Furthermore, access to proprietary databases, has allowed the identification of novel nucleic acid and polypeptide sequences.

### 1.2 By-Pass (BPS) Polypeptides

[0550] Sequences (full length cDNA, ESTs or genomic) related to SEQ ID NO: 267 and SEQ ID NO: 268 were identified amongst those maintained in the Entrez Nucleotides database at the National Center for Biotechnology Information (NCBI) using database sequence search tools, such as the Basic Local Alignment Tool (BLAST) (Altschul et al. (1990) J. Mol. Biol. 215:403-410; and Altschul et al. (1997) Nucleic Acids Res. 25:3389-3402). The program is used to find regions of local similarity between sequences by comparing nucleic acid or polypeptide sequences to sequence databases and by calculating the statistical significance of matches. For example, the polypeptide encoded by the nucleic acid of SEQ ID NO: 267 was used for the TBLASTN algorithm, with default settings and the filter to ignore low complexity sequences set off. The output of the analysis was viewed by pairwise comparison, and ranked according to the probability score (E-value), where the score reflect the probability that a particular alignment occurs by chance (the lower the E-value, the more significant the hit). In addition to E-values, comparisons were also scored by percentage identity. Percentage identity refers to the number of identical nucleotides (or amino acids) between the two compared nucleic acid (or polypeptide) sequences over a particular length. In some instances, the default parameters may be adjusted to modify the stringency of the search. For example the E-value may be increased to show less stringent matches. This way, short nearly exact matches may be identified.

[0551] Table A2 provides a list of nucleic acid sequences related to SEQ ID NO: 267 and SEQ ID NO: 268.

TABLE A2
Examples of BPS nucleic acids and polypeptides:

| | Nucleic acid | Polypeptide |
|---|---|---|
| Name | SEQ ID NO: | SEQ ID NO: |
| A. thaliana_AT1G01550.1 | 267 | 268 |
| B. napus_TC75033 | 269 | 270 |
| P_sitchensis_EF677456 | 271 | 272 |
| C. endivia_TA154_114280 | 273 | 274 |
| A. thaliana_AT2G46080.1 | 275 | 276 |
| A. thaliana_AT3G61500.1 | 277 | 278 |
| A. thaliana_AT4G01360.1 | 279 | 280 |
| B. napus_TC69302 | 281 | 282 |
| B. napus_TC72556 | 283 | 284 |
| B. napus_TC76712 | 285 | 286 |
| B. oleracea_TA5103_3712 | 287 | 288 |
| G. max_Glyma07g07240.1 | 289 | 290 |
| G. max_Glyma09g39170.1 | 291 | 292 |
| G. max_Glyma18g47160.1 | 293 | 294 |
| M_truncatula_BT052402 | 295 | 296 |
| T. pratense_TA1487_57577 | 297 | 298 |
| J. hindsii_x_regia_TA339_432290 | 299 | 300 |
| P. trichocarpa_scaff_II.1515 | 301 | 302 |
| P. trichocarpa_scaff_XIV.343 | 303 | 304 |
| G. hirsutum_TC114048 | 305 | 306 |
| Aquilegia_sp_TC23399 | 307 | 308 |
| M. domestica_TC8317 | 309 | 310 |
| C. sinensis_TC8893 | 311 | 312 |
| P. trifoliata_TA8107_37690 | 313 | 314 |
| C. annuum_TC9590 | 315 | 316 |
| I. nil_TC49 | 317 | 318 |
| I. nil_TC6085 | 319 | 320 |
| N. benthamiana_NP13050546 | 321 | 322 |
| N. benthamiana_TC11467 | 323 | 324 |
| N. tabacum_TC16925 | 325 | 326 |
| S. lycopersicum_TC192275 | 327 | 328 |
| S. lycopersicum_TC195035 | 329 | 330 |
| S. tuberosum_TC173984 | 331 | 332 |
| V. vinifera_GSVIVT00026918001 | 333 | 334 |
| O. sativa_LOC_Os10g36950.1 | 335 | 336 |
| S. bicolor_Sb01g017226.1 | 337 | 338 |
| Zea_mays_EU960931 | 339 | 340 |

[0552] Sequences have been tentatively assembled and publicly disclosed by research institutions, such as The Institute for Genomic Research (TIGR; beginning with TA). The Eukaryotic Gene Orthologs (EGO) database may be used to identify such related sequences, either by keyword search or by using the BLAST algorithm with the nucleic acid sequence or polypeptide sequence of interest. Special nucleic acid sequence databases have been created for particular organisms, such as by the Joint Genome Institute. Furthermore, access to proprietary databases, has allowed the identification of novel nucleic acid and polypeptide sequences.

### 1.3 SIZ1 Polypeptides

[0553] Sequences (full length cDNA, ESTs or genomic) related to SEQ ID NO: 353 and SEQ ID NO: 354 were identified amongst those maintained in the Entrez Nucleotides database at the National Center for Biotechnology Information (NCBI) using database sequence search tools, such as the Basic Local Alignment Tool (BLAST) (Altschul et al. (1990) J. Mol. Biol. 215:403-410; and Altschul et al. (1997) Nucleic Acids Res. 25:3389-3402). The program is used to find regions of local similarity between sequences by comparing nucleic acid or polypeptide sequences to sequence databases and by calculating the statistical significance of matches. For example, the polypeptide encoded by the nucleic acid of SEQ ID NO: 353 was used for the TBLASTN algorithm, with default settings and the filter to ignore low complexity sequences set off. The output of the analysis was viewed by pairwise comparison, and ranked according to the probability score (E-value), where the score reflect the probability that a particular alignment occurs by chance (the lower the E-value, the more significant the hit). In addition to E-values, comparisons were also scored by percentage identity. Percentage identity refers to the number of identical nucleotides (or amino acids) between the two compared nucleic acid (or polypeptide) sequences over a particular length. In some instances, the default parameters may be adjusted to modify the stringency of the search. For example the E-value may be increased to show less stringent matches. This way, short nearly exact matches may be identified.

[0554] Table A3 provides a list of nucleic acid sequences related to SEQ ID NO: 353 and SEQ ID NO: 354.

TABLE A3
Examples of SIZ1 nucleic acids and polypeptides:

| | Nucleic | Poly- |
|---|---|---|
| | acid | peptide |
| | SEQ ID | SEQ |
| Name | NO: | ID NO: |
| Arabidopsis EC sequence | 353 | 354 |
| sumo ligase, [Ricinus communis] | 355 | 356 |
| hypothetical protein [Vitis vinifera] | 357 | 358 |
| Zea mays ZM_BFb0169I21 | 359 | 360 |
| hypothetical protein LOC100272532 [Zea mays] | 361 | 362 |
| A. thaliana_AT5G60410 SIZ1 | 363 | 364 |
| A thaliana NP_001032109 ATSIZ1/SIZ1 | 365 | 366 |
| “AT5G60410”AT5G60420 | | |
| AT5G41580” NP_198973.3 EMB3001like | 367 | 368 |
| (EMBRYO DEFECTIVE 3001) | | |
| AT1G08910.1 EMB3001protein | 369 | 370 |
| H. vulgare_TA46195_4513#1 | 371 | 372 |
| M. truncatula_AC150891_19.5#1 | 373 | 374 |
| M. truncatula_AC152176_5.4#1 | 375 | 376 |
| O. sativa_Os05g0125000#1 | 377 | 378 |
| O. sativa_Os03g0719100#1 | 379 | 380 |
| P. patens_159214#1 | 381 | 382 |
| P. patens_165698#1 | 383 | 384 |
| P. patens_159935#1 | 385 | 386 |
| 3 | 387 | 388 |
| P. trichocarpa_scaff_66.246#1 | 389 | 390 |
| P. trichocarpa_scaff_IX.1493#1 | 391 | 392 |
| P. trichocarpa_scaff_X.2133#1 | 3923 | 394 |
| C. vulgaris_83729#1 | 395 | 396 |
| S. bicolor_5288383#1 | 397 | 398 |
| S. bicolor_5285414#1 | 399 | 400 |
| sorghum bicolor MIZ XP_002439205.1 | 401 | 402 |
| GRMZM2G007288_aa | 403 | 404 |
| AK244805Soybean translation | 405 | 406 |
| Z. mays_ZM07MSbpsHQ_62031266.f01@48407#1 | 407 | 408 |

[0555] Sequences have been tentatively assembled and publicly disclosed by research institutions, such as The Institute for Genomic Research (TIGR; beginning with TA). The Eukaryotic Gene Orthologs (EGO) database may be used to identify such related sequences, either by keyword search or by using the BLAST algorithm with the nucleic acid sequence or polypeptide sequence of interest. Special nucleic acid sequence databases have been created for particular organisms, such as by the Joint Genome Institute. Furthermore, access to proprietary databases, has allowed the identification of novel nucleic acid and polypeptide sequences.

1.4 bZIP-S Polypeptides

[0556] Sequences (full length cDNA, ESTs or genomic) related to SEQ ID NO: 421 and SEQ ID NO: 422 were identified amongst those maintained in the Entrez Nucleotides database at the National Center for Biotechnology Information (NCBI) using database sequence search tools, such as the Basic Local Alignment Tool (BLAST) (Altschul et al. (1990) J. Mol. Biol. 215:403-410; and Altschul et al. (1997) Nucleic Acids Res. 25:3389-3402). The program is used to find regions of local similarity between sequences by comparing nucleic acid or polypeptide sequences to sequence databases and by calculating the statistical significance of matches. For example, the polypeptide encoded by the nucleic acid of SEQ ID NO: 421 was used for the TBLASTN algorithm, with default settings and the filter to ignore low complexity sequences set off. The output of the analysis was viewed by pairwise comparison, and ranked according to the probability score (E-value), where the score reflect the probability that a particular alignment occurs by chance (the lower the E-value, the more significant the hit). In addition to E-values, comparisons were also scored by percentage identity. Percentage identity refers to the number of identical nucleotides (or amino acids) between the two compared nucleic acid (or polypeptide) sequences over a particular length. In some instances, the default parameters may be adjusted to modify the stringency of the search. For example the E-value may be increased to show less stringent matches. This way, short nearly exact matches may be identified.

[0557] Table A4 provides a list of nucleic acid sequences related to SEQ ID NO: 421 and SEQ ID NO: 422.

TABLE A4
Examples of bZIP-S nucleic acids and polypeptides:

| | Nucleic | Poly- |
|---|---|---|
| | acid | peptide |
| | SEQ | SEQ |
| Name of bZIP-S | ID NO | ID NO |
| Mt_bZIP | 421 | 422 |
| A. thaliana_AT1G75390.1#1 | 423 | 424 |
| Arabidopsis_thaliana_AF053939#1 | 425 | 426 |
| Arabidopsis_thaliana_AT2G18162.1#1 | 427 | 428 |
| Arabidopsis_thaliana_AT4G34590.1#1 | 429 | 430 |
| B. napus_BN06MC15489_44215029@15438#1 | 431 | 432 |
| B. napus_BN06MC17829_45597483@17769#1 | 433 | 434 |
| B. napus_BN06MC23287_49055078@23201#1 | 435 | 436 |
| Capsicum_annuum_AY789639#1 | 437 | 438 |
| Capsicum_chinense_AF127797#1 | 439 | 440 |
| Capsicum_chinense_AF430372#1 | 441 | 442 |
| G. max_GM06MC01804_48915393@1791#1 | 443 | 444 |
| G. max_GM06MC17143_59654278@16848#1 | 445 | 446 |
| G. max_GM06MC32046_sj86f07@31311#1 | 447 | 448 |
| G. max_GM06MC32426_sk55g01@31681#1 | 449 | 450 |
| G. max_GM06MC33749_sm67c05@32966#1 | 451 | 452 |
| Glycine_max_AF532621#1 | 453 | 454 |
| H. vulgare_c62949710hv270303@7333#1 | 455 | 456 |
| Medicago_truncatula_BT053497#1 | 457 | 458 |
| Mt_bZIP2 | 459 | 460 |
| Nicotiana_tabacum_AY045570#1 | 461 | 462 |
| Oryza_sativa_Japonica_Group_AK070887#1 | 463 | 464 |
| P. trichocarpa_710131#1 | 465 | 466 |
| P. trichocarpa_715285#1 | 467 | 468 |
| P. trichocarpa_719591#1 | 469 | 470 |
| P. trichocarpa_818112#1 | 471 | 472 |
| Petroselinum_crispum_AJ292745#1 | 473 | 474 |
| Populus_trichocarpa_EF147315#1 | 475 | 476 |
| S. bicolor_Sb04g002700.1#1 | 477 | 478 |
| S. bicolor_Sb07g015450.1#1 | 479 | 480 |
| Solanum_lycopersicum_FJ647190#1 | 481 | 482 |
| T. erecta_SIN_01b-CS_Scarletade- | 483 | 484 |
| 12-L23.b1@917#1 | | |
| Tamarix_hispida_FJ752700#1 | 485 | 486 |
| V. vinifera_GSVIVT00014558001#1 | 487 | 488 |
| V. vinifera_GSVIVT00036338001#1 | 489 | 490 |
| V. vinifera_GSVIVT00036899001#1 | 491 | 492 |
| Z. mays_ZM07MC37862_BFb0368K21@37736#1 | 493 | 494 |
| Zea_mays_BT018074#1 | 495 | 496 |
| Zea_mays_BT067356#1 | 497 | 498 |
| Zea_mays_EU976771#1 | 499 | 500 |

[0558] Sequences have been tentatively assembled and publicly disclosed by research institutions, such as The Institute for Genomic Research (TIGR; beginning with TA). The Eukaryotic Gene Orthologs (EGO) database may be used to identify such related sequences, either by keyword search or by using the BLAST algorithm with the nucleic acid sequence or polypeptide sequence of interest. Special nucleic acid sequence databases have been created for particular organisms, such as by the Joint Genome Institute. Furthermore, access to proprietary databases, has allowed the identification of novel nucleic acid and polypeptide sequences.

1.5 SPA15-like Polypeptides

[0559] Sequences (full length cDNA, ESTs or genomic) related to SEQ ID NO: 633 and SEQ ID NO: 634 were identified amongst those maintained in the Entrez Nucleotides database at the National Center for Biotechnology Information (NCBI) using database sequence search tools, such as the Basic Local Alignment Tool (BLAST) (Altschul et al. (1990) J. Mol. Biol. 215:403-410; and Altschul et al. (1997) Nucleic Acids Res. 25:3389-3402). The program is used to find regions of local similarity between sequences by comparing nucleic acid or polypeptide sequences to sequence databases and by calculating the statistical significance of matches. For example, the polypeptide encoded by the nucleic acid of SEQ ID NO: 633 was used for the TBLASTN algorithm, with default settings and the filter to ignore low complexity sequences set off. The output of the analysis was viewed by pairwise comparison, and ranked according to the probability score (E-value), where the score reflect the probability that a particular alignment occurs by chance (the lower the E-value, the more significant the hit). In addition to E-values, comparisons were also scored by percentage identity. Percentage identity refers to the number of identical nucleotides (or amino acids) between the two compared nucleic acid (or polypeptide) sequences over a particular length. In some instances, the default parameters may be adjusted to modify the stringency of the search. For example the E-value may be increased to show less stringent matches. This way, short nearly exact matches may be identified.

[0560] Table A5 provides a list of nucleic acid sequences related to SEQ ID NO: 633 and SEQ ID NO: 634.

TABLE A5
Examples of SPA15-like nucleic acids and polypeptides:

| | Nucleic acid | Polypeptide |
|---|---|---|
| Name | SEQ ID NO: | SEQ ID NO: |
| Os_SPA15 like | 633 | 634 |
| A. thaliana_AT1G66330.1#1 | 635 | 636 |
| Arabidopsis_thaliana_AY086709#1 | 637 | 638 |
| B. napus_TC82749#1 | 639 | 640 |
| LOC_Os05g05600.1#1 | 641 | 642 |
| LOC_Os05g05600.5#1 | 643 | 644 |
| LOC_Os05g05600.6#1 | 645 | 646 |
| S. bicolor_Sb05g026090.1#1 | 647 | 648 |
| Zea_mays_EU956861#1 | 649 | 650 |
| C. solstitialis_TA1343_347529#1 | 651 | 652 |
| G. max_Glyma14g39620.1#1 | 653 | 654 |
| H. annuus_TC31796#1 | 655 | 656 |
| Ipomoea_batatas_AF234536#1 | 657 | 658 |
| L. sativa_TC17902#1 | 659 | 660 |
| M. truncatula_AC155282_17.4#1 | 661 | 662 |
| P. euphratica_TA2890_75702#1 | 663 | 664 |

[0561] Sequences have been tentatively assembled and publicly disclosed by research institutions, such as The Institute for Genomic Research (TIGR; beginning with TA). The Eukaryotic Gene Orthologs (EGO) database may be used to identify such related sequences, either by keyword search or by using the BLAST algorithm with the nucleic acid sequence or polypeptide sequence of interest. Special nucleic acid sequence databases have been created for particular organisms, such as by the Joint Genome Institute. Furthermore, access to proprietary databases, has allowed the identification of novel nucleic acid and polypeptide sequences.

### Example 2

### Alignment of Sequences to the Plypeptide Sequences Used in the Methods of the Invention

### 2.1 O-FUT-Like Polypeptides

[0562] Alignment of polypeptide sequences was performed using the AlignX programme from the Vector NTI (Invitrogen). Minor manual editing was done to further optimise the alignment. The O-FUT polypeptides are aligned in FIG. 2.

[0563] A phylogenetic tree of O-FUT polypeptides (FIG. 3) was reproduced from the PLAZA web site, according to the method of Yves Van De Peer et al. (2009)—Plaza, a resource for plant comparative genomics (www.vib.gent.be).

### 2.2 By-Pass (BPS) Polypeptides

[0564] The alignment was generated using MAFFT (Katoh and Toh (2008) Briefings in Bioinformatics 9:286-298). A neighbour-joining tree was calculated using QuickTree (Howe et al. (2002), Bioinformatics 18(11): 1546-7), 100 bootstrap repetitions. The circular phylogram was drawn using Dendroscope (Huson et al. (2007), BMC Bioinformatics 8(1):460). Confidence for 100 bootstrap repetitions is indicated for major branching. Minor manual editing was done to further optimise the alignment.

### 2.3 SIZ1 Polypeptides

[0565] Alignment of polypeptide sequences was performed using the ClustalW 2.0 algorithm of progressive alignment (Thompson et al. (1997) Nucleic Acids Res 25:4876-4882; Chenna et al. (2003). Nucleic Acids Res 31:3497-3500) with standard setting (slow alignment, similarity matrix: Gonnet, gap opening penalty 10, gap extension penalty: 0.2). Minor manual editing was done to further optimise the alignment. The SIZ1 polypeptides are aligned in FIG. 9.

[0566] A phylogenetic tree of SIZ1 polypeptides (FIG. 10) was constructed using a neighbour-joining clustering algorithm as provided in the AlignX programme from the Vector NTI (Invitrogen).

2.4 bZIP-S Polypeptides

[0567] A multiple alignment of the bZIP-S polypeptides of Table A (FIG. 12) was made using an alignment program based on the algorithm ClustalW as provided in the AlignX programme from the Vector NTI (Invitrogen). Default parameters were used corresponding to Blosum 62 matrix (gap opening penalty 10, gap extension penalty: 0.2). Minor manual editing was done to further enhance the alignment.

### 2.5 SPA15-Like Polypeptides

[0568] Alignment of polypeptide sequences was performed using the MAFFT (mafft (version 6.624, L-INS-I method): MAFFT: Katoh and Toh (2008)—Briefings in Bioinformatics 9:286-298). Minor manual editing was done to further optimise the alignment. The SPA15-like polypeptides are aligned in FIG. 15.

[0569] A phylogenetic tree of SPA15-like polypeptides (FIG. 16) was constructed using Dendroscope (Dendroscope: Huson et al. (2007), BMC Bioinformatics 8(1):460).

### Example 3

### Calculation of Global Percentage Identity Between Polypeptide Sequences Useful in Performing the Methods of the Invention

### 3.1 O-FUT-Like Polypeptides

[0570] Global percentages of similarity and identity between full length polypeptide sequences useful in performing the methods of the invention are determined using one of the methods available in the art, the MatGAT (Matrix Global Alignment Tool) software (BMC Bioinformatics. 2003 4:29. MatGAT: an application that generates similarity/identity matrices using protein or DNA sequences. Campanella J J, Bitincka L, Smalley J; software hosted by Ledion Bitincka). MatGAT software generates similarity/identity matrices for DNA or protein sequences without needing pre-alignment of the data. The program performs a series of pair-wise alignments using the Myers and Miller global alignment algorithm (with a gap opening penalty of 12, and a gap extension penalty of 2), calculates similarity and identity using for example Blosum 62 (for polypeptides), and then places the results in a distance matrix.

[0571] Parameters to be used in the comparison are: Scoring matrix: Blosum62, First Gap: 12, Extending Gap: 2.

### 3.2 By-Pass (BPS) Polypeptides

[0572] Global percentages of similarity and identity between full length polypeptide sequences useful in performing the methods of the invention were determined using one of the methods available in the art, the MatGAT (Matrix Global Alignment Tool) software (BMC Bioinformatics. 2003 4:29. MatGAT: an application that generates similarity/identity matrices using protein or DNA sequences. Campanella J J, Bitincka L, Smalley J; software hosted by Ledion Bitincka). MatGAT software generates similarity/identity matrices for DNA or protein sequences without needing pre-alignment of the data. The program performs a series of pair-wise alignments using the Myers and Miller global alignment algorithm (with a gap opening penalty of 12, and a gap extension penalty of 2), calculates similarity and identity using for example Blosum 62 (for polypeptides), and then places the results in a distance matrix.

[0573] Parameters used in the comparison were: Scoring matrix: Blosum62, First Gap: 12, Extending Gap: 2.

[0574] Results of the software analysis are shown in Table B2 for the global similarity and identity over the full length of the polypeptide sequences. The sequence identity (in %) between the BPS polypeptide sequences useful in performing the methods of the invention is generally higher than 55% compared to SEQ ID NO: 268.

TABLE B2
MatGAT results for global similarity and identity over the full length of the polypeptide sequences.

| | 1 | 2 | 3 | 4 | 5 | 6 | 7 | 8 | 9 | 10 | 11 | 12 | 13 | 14 |
|---|---|---|---|---|---|---|---|---|---|---|---|---|---|---|
| 1. P_sitchensis_EF085295 | | 52.30 | 28.60 | 31.30 | 33.90 | 24.30 | 26.20 | 30.90 | 25.50 | 34.60 | 34.20 | 30.50 | 33.70 | 36.40 |
| 2. P_sitchensis_EF677456 | | | 29.30 | 34.70 | 37.70 | 24.50 | 27.60 | 33.90 | 28.70 | 37.50 | 37.50 | 33.80 | 39.80 | 40.00 |
| 3. C. endivia_TA154_114280 | | | | 40.10 | 43.10 | 29.90 | 27.90 | 38.90 | 30.20 | 43.20 | 42.30 | 38.50 | 37.50 | 36.50 |
| 4. A. thaliana_AT1G01550.1 | | | | | 59.30 | 34.40 | 52.80 | 86.00 | 54.80 | 58.00 | 56.60 | 86.60 | 53.40 | 54.50 |
| 5. A. thaliana_AT2G46080.1 | | | | | | 41.60 | 38.20 | 56.10 | 44.30 | 88.50 | 86.50 | 55.70 | 60.20 | 60.20 |
| 6. A. thaliana_AT3G61500.1 | | | | | | | 28.40 | 32.60 | 30.50 | 40.60 | 40.50 | 32.50 | 35.90 | 34.60 |
| 7. A. thaliana_AT4G01360.1 | | | | | | | | 48.10 | 66.80 | 38.90 | 37.60 | 47.80 | 37.00 | 35.40 |
| 8. B. napus_TC69302 | | | | | | | | | 52.10 | 54.30 | 53.80 | 99.10 | 52.50 | 53.50 |
| 9. B. napus_TC72556 | | | | | | | | | | 44.90 | 43.20 | 52.20 | 41.40 | 39.20 |
| 10. B. napus_TC75033 | | | | | | | | | | | 86.80 | 54.10 | 59.70 | 59.20 |
| 11. B. napus_TC76712 | | | | | | | | | | | | 53.30 | 58.10 | 58.50 |
| 12. B. oleracea_TA5103_3712 | | | | | | | | | | | | | 52.50 | 54.50 |
| 13. G. max_Glyma07g07240.1 | | | | | | | | | | | | | | 72.00 |
| 14. G. max_Glyma09g39170.1 | | | | | | | | | | | | | | |
| 15. G. max_Glyma18g47160.1 | | | | | | | | | | | | | | |
| 16. M_truncatula_BT052402 | | | | | | | | | | | | | | |
| 17. T. pratense_TA1487_57577 | | | | | | | | | | | | | | |
| 18. | | | | | | | | | | | | | | |
| J. hindsii_x_regia_TA339_432290 | | | | | | | | | | | | | | |
| 19. P. trichocarpa_scaff_II.1515 | | | | | | | | | | | | | | |
| 20. P. trichocarpa_scaff_XIV.343 | | | | | | | | | | | | | | |
| 21. G. hirsutum_TC114048 | | | | | | | | | | | | | | |
| 22. Aquilegia_sp_TC23399 | | | | | | | | | | | | | | |
| 23. M. domestica_TC8317 | | | | | | | | | | | | | | |
| 24. C. sinensis_TC8893 | | | | | | | | | | | | | | |
| 25. P. trifoliata_TA8107_37690 | | | | | | | | | | | | | | |
| 26. C. annuum_TC9590 | | | | | | | | | | | | | | |

| | 15 | 16 | 17 | 18 | 19 | 20 | 21 | 22 | 23 | 24 | 25 | 26 | 27 |
|---|---|---|---|---|---|---|---|---|---|---|---|---|---|
| 1. P_sitchensis_EF085295 | 36.40 | 34.00 | 35.00 | 37.60 | 34.70 | 35.10 | 32.70 | 37.30 | 36.90 | 36.50 | 36.80 | 34.80 | 32.90 |
| 2. P_sitchensis_EF677456 | 39.70 | 40.60 | 39.20 | 40.70 | 40.10 | 38.00 | 35.90 | 38.60 | 39.70 | 40.10 | 39.60 | 37.90 | 35.00 |
| 3. C. endivia_TA154_114280 | 37.10 | 37.90 | 35.40 | 42.90 | 40.10 | 44.20 | 40.30 | 40.30 | 40.50 | 39.50 | 39.50 | 41.90 | 38.50 |
| 4. A. thaliana_AT1G01550.1 | 53.90 | 51.80 | 54.80 | 57.90 | 55.90 | 55.30 | 56.40 | 51.00 | 55.30 | 57.80 | 57.00 | 53.10 | 46.90 |
| 5. A. thaliana_AT2G46080.1 | 60.80 | 57.50 | 58.20 | 61.80 | 61.50 | 61.00 | 57.10 | 54.10 | 59.90 | 61.50 | 61.50 | 53.40 | 51.10 |
| 6. A. thaliana_AT3G61500.1 | 34.60 | 36.00 | 33.00 | 34.60 | 32.80 | 31.90 | 34.60 | 29.70 | 35.40 | 33.80 | 33.10 | 28.20 | 26.50 |
| 7. A. thaliana_AT4G01360.1 | 35.90 | 36.90 | 36.60 | 40.30 | 38.90 | 39.90 | 39.90 | 35.60 | 36.10 | 39.20 | 38.40 | 37.90 | 34.40 |
| 8. B. napus_TC69302 | 53.00 | 51.50 | 54.40 | 55.10 | 54.30 | 53.50 | 53.50 | 48.60 | 54.10 | 55.70 | 54.50 | 51.30 | 46.20 |
| 9. B. napus_TC72556 | 39.80 | 39.70 | 41.30 | 45.00 | 42.30 | 42.00 | 40.30 | 36.90 | 40.70 | 43.60 | 42.80 | 40.20 | 36.60 |
| 10. B. napus_TC75033 | 59.80 | 57.10 | 58.10 | 61.90 | 60.80 | 62.00 | 57.50 | 55.90 | 58.90 | 60.20 | 59.90 | 53.50 | 51.00 |
| 11. B. napus_TC76712 | 59.00 | 56.00 | 57.30 | 60.30 | 58.60 | 59.60 | 56.50 | 54.00 | 58.50 | 59.20 | 58.90 | 51.40 | 50.00 |
| 12. B. oleracea_TA5103_3712 | 54.00 | 51.50 | 54.10 | 54.80 | 53.70 | 53.00 | 53.00 | 48.50 | 54.40 | 54.80 | 54.00 | 52.00 | 46.00 |
| 13. G. max_Glyma07g07240.1 | 71.20 | 79.30 | 69.50 | 61.70 | 59.90 | 57.90 | 56.20 | 51.10 | 60.70 | 64.10 | 63.80 | 54.20 | 49.70 |
| 14. G. max_Glyma09g39170.1 | 95.50 | 67.90 | 77.60 | 63.70 | 61.60 | 59.60 | 58.80 | 55.60 | 63.60 | 64.50 | 63.40 | 54.70 | 49.40 |
| 15. G. max_Glyma18g47160.1 | | 67.90 | 78.40 | 63.70 | 62.80 | 60.50 | 58.80 | 56.30 | 63.10 | 64.50 | 63.40 | 55.50 | 50.00 |
| 16. M_truncatula_BT052402 | | | 65.90 | 62.10 | 59.80 | 57.80 | 54.40 | 50.70 | 61.70 | 61.70 | 61.70 | 52.20 | 47.80 |
| 17. T. pratense_TA1487_57577 | | | | 61.50 | 61.10 | 60.20 | 57.30 | 56.50 | 61.60 | 64.80 | 64.20 | 52.80 | 50.30 |
| 18. J. hindsii_x_regia_TA339_432290 | | | | | 68.30 | 66.40 | 63.90 | 56.30 | 71.40 | 67.10 | 66.90 | 61.50 | 55.80 |
| 19. P. trichocarpa_scaff_II.1515 | | | | | | 80.50 | 61.90 | 54.40 | 68.20 | 65.50 | 65.20 | 58.00 | 54.50 |
| 20. P. trichocarpa_scaff_XIV.343 | | | | | | | 61.50 | 56.10 | 65.80 | 65.50 | 64.70 | 56.50 | 55.40 |
| 21. G. hirsutum_TC114048 | | | | | | | | 51.70 | 61.00 | 65.30 | 64.40 | 54.20 | 50.60 |
| 22. Aquilegia_sp_TC23399 | | | | | | | | | 55.90 | 57.20 | 56.60 | 53.90 | 49.20 |
| 23. M. domestica_TC8317 | | | | | | | | | | 68.50 | 68.50 | 61.10 | 54.50 |
| 24. C. sinensis_TC8893 | | | | | | | | | | | 97.70 | 58.50 | 55.40 |
| 25. P. trifoliata_TA8107_37690 | | | | | | | | | | | | 58.80 | 54.50 |
| 26. C. annuum_TC9590 | | | | | | | | | | | | | 58.40 |

### 3.3 SIZ1 Polypeptides

[0575] Global percentages of similarity and identity between full length polypeptide sequences useful in performing the methods of the invention are determined using one of the methods available in the art, the MatGAT (Matrix Global Alignment Tool) software (BMC Bioinformatics. 2003 4:29. MatGAT: an application that generates similarity/identity matrices using protein or DNA sequences. Campanella J J, Bitincka L, Smalley J; software hosted by Ledion Bitincka). MatGAT software generates similarity/identity matrices for DNA or protein sequences without needing pre-alignment of the data. The program performs a series of pair-wise alignments using the Myers and Miller global alignment algorithm (with a gap opening penalty of 12, and a gap extension penalty of 2), calculates similarity and identity using for example Blosum 62 (for polypeptides), and then places the results in a distance matrix.

[0576] Parameters to be used in the comparison are: Scoring matrix: Blosum62, First Gap: 12, Extending Gap: 2.

3.4 bZIP-S Polypeptides

[0577] Global percentages of similarity and identity between full length polypeptide sequences useful in performing the methods of the invention were determined using one of the methods available in the art, the MatGAT (Matrix Global Alignment Tool) software (BMC Bioinformatics. 2003 4:29. MatGAT: an application that generates similarity/identity matrices using protein or DNA sequences. Campanella J J, Bitincka L, Smalley J; software hosted by Ledion Bitincka). MatGAT software generates similarity/identity matrices for DNA or protein sequences without needing pre-alignment of the data. The program performs a series of pair-wise alignments using the Myers and Miller global alignment algorithm (with a gap opening penalty of 12, and a gap extension penalty of 2), calculates similarity and identity using for example Blosum 62 (for polypeptides), and then places the results in a distance matrix. Sequence similarity is shown in the bottom half of the dividing line and sequence identity is shown in the top half of the diagonal dividing line.

[0578] Parameters used in the comparison were: Scoring matrix: Blosum62, First Gap: 12, Extending Gap: 2.

[0579] Results of the software analysis are shown in Table B4 for the global similarity and identity over the full length of the polypeptide sequences. The sequence identity (in %) between the bZIP-S polypeptide sequences useful in performing the methods of the invention can be is generally higher than 43% compared to SEQ ID NO: 354.

TABLE B4
MatGAT results for global similarity and identity over the full length of the polypeptide sequences.

| | 1 | 31 | 32 | 33 | 34 | 35 | 36 | 37 | 38 | 39 | 40 | 41 | 42 |
|---|---|---|---|---|---|---|---|---|---|---|---|---|---|
| 1. Mt_bZIP | | 60.1 | 60.1 | 58.5 | 61.1 | 53.3 | 50.3 | 46.2 | 50.9 | 48.8 | 43.8 | 62 | 43 |
| 31. B. napus_BN06MC17829_45597483@17769#1 | 81.4 | | 80 | 79.5 | 47.8 | 49.1 | 47.1 | 44.6 | 47.4 | 46.9 | 36.5 | 51.3 | 37 |
| 32. Arabidopsis_thaliana_AT4G34590.1#1 | 79.2 | 89.9 | | 99.4 | 50.9 | 51.7 | 42.5 | 45.3 | 50 | 42.5 | 36.2 | 48.1 | 34.4 |
| 33. Arabidopsis_thaliana_AF053940#1 | 77.5 | 89.4 | 99.4 | | 51.2 | 50.9 | 42.5 | 45 | 49.2 | 42.3 | 36 | 47.8 | 34.2 |
| 34. V. vinifera_GSVIVT00036899001#1 | 77.7 | 70.7 | 71.7 | 71.9 | | 55 | 48.1 | 42.9 | 53.1 | 43.6 | 32.8 | 46.5 | 39.6 |
| 35. Arabidopsis_thaliana_BT004768#1 | 68.9 | 68.9 | 71.9 | 70.1 | 70.1 | | 41.9 | 64.1 | 96.5 | 48 | 33 | 43.7 | 41.7 |
| 36. V. vinifera_GSVIVT00014558001#1 | 69.9 | 68.6 | 63.5 | 63.1 | 67.5 | 59.3 | | 36.4 | 42 | 41.3 | 30.1 | 44.2 | 33.6 |
| 37. B. napus_BN06MC23287_49055078@23201#1 | 64.2 | 63 | 62.4 | 62.4 | 59.4 | 79.6 | 56.4 | | 66.5 | 35.4 | 31.3 | 38.2 | 41.2 |
| 38. A. thaliana_AT1G75390.1#1 | 67.1 | 67.1 | 69.4 | 67.6 | 67.6 | 96.5 | 58.4 | 79.8 | | 48.3 | 33 | 42.2 | 39.7 |
| 39. G. max_GM06MC33749_sm67c05@32966#1 | 68.6 | 64.9 | 60.4 | 60 | 65 | 64.1 | 59.1 | 56.4 | 62.4 | | 36.7 | 44.6 | 38 |
| 40. S. bicolor_Sb07g015450.1#1 | 57.4 | 58 | 55.7 | 55.7 | 53.4 | 52.8 | 44.9 | 48.3 | 53.4 | 56.3 | | 37.5 | 31.3 |
| 41. G. max_GM06MC32046_sj86f07@31311#1 | 76.3 | 69.9 | 66.7 | 66.3 | 66.9 | 63.5 | 65 | 57.6 | 61.3 | 63.6 | 54.5 | | 43.2 |
| 42. Tamarix_hispida_FJ752700#1 | 66.7 | 62.7 | 57.2 | 56.9 | 59.9 | 58.1 | 59.7 | 53.9 | 56.1 | 54.5 | 48.3 | 66 | |

### 3.5 SPA15-Like Polypeptides

[0580] Global percentages of similarity and identity between full length polypeptide sequences useful in performing the methods of the invention were determined using one of the methods available in the art, the MatGAT (Matrix Global Alignment Tool) software (BMC Bioinformatics. 2003 4:29. MatGAT: an application that generates similarity/identity matrices using protein or DNA sequences. Campanella J J, Bitincka L, Smalley J; software hosted by Ledion Bitincka). MatGAT software generates similarity/identity matrices for DNA or protein sequences without needing pre-alignment of the data. The program performs a series of pair-wise alignments using the Myers and Miller global alignment algorithm (with a gap opening penalty of 12, and a gap extension penalty of 2), calculates similarity and identity using for example Blosum 62 (for polypeptides), and then places the results in a distance matrix. Sequence similarity is shown in the bottom half of the dividing line and sequence identity is shown in the top half of the diagonal dividing line.

[0581] Parameters used in the comparison were: Scoring matrix: Blosum62, First Gap: 12, Extending Gap: 2.

[0582] Results of the software analysis are shown in Table B5 for the global similarity and identity over the full length of the polypeptide sequences. The sequence identity (in %) between the SPA15-like polypeptide sequences useful in performing the methods of the invention is generally higher than 30% compared to SEQ ID NO: 634.

TABLE B5
MatGAT results for global similarity and identity over the full length of the polypeptide sequences.

| | | | | | | | | |
|---|---|---|---|---|---|---|---|---|
| 1. Os_SPA15like | | 53.90 | 54.60 | 27.60 | 99.80 | 94.10 | 65.20 | 71.40 |
| 2. A. thaliana_AT1G66330.1 | 67.00 | | 97.80 | 39.70 | 54.10 | 56.30 | 48.10 | 54.80 |
| 3. Arabidopsis_thaliana_AY086709 | 67.00 | 99.30 | | 39.20 | 54.80 | 57.00 | 49.10 | 55.30 |
| 4. B. napus_TC82749 | 32.20 | 41.20 | 41.00 | | 27.80 | 29.50 | 41.70 | 28.50 |
| 5. LOC_Os05g05600.1 | 99.80 | 67.20 | 67.20 | 32.40 | | 94.30 | 65.40 | 71.40 |
| 6. LOC_Os05g05600.5 | 94.10 | 69.40 | 69.40 | 34.30 | 94.30 | | 69.40 | 72.50 |
| 7. LOC_Os05g05600.6 | 65.40 | 58.00 | 58.30 | 49.00 | 65.60 | 69.60 | | 55.20 |
| 8. S. bicolor_Sb05g026090.1 | 82.50 | 67.80 | 68.90 | 33.60 | 82.50 | 81.70 | 60.00 | |
| 9. Zea_mays_EU956861 | 83.40 | 67.40 | 68.10 | 33.50 | 83.40 | 82.20 | 59.70 | 93.80 |
| 10. C. clementina_DY280874 | 41.40 | 47.50 | 48.40 | 32.30 | 41.40 | 43.90 | 36.40 | 39.50 |
| 11. C. clementina_DY297038 | 40.90 | 47.70 | 48.20 | 33.10 | 40.90 | 43.40 | 36.40 | 39.50 |
| 12. C. clementina_TC487 | 42.90 | 50.10 | 50.60 | 32.30 | 42.90 | 43.90 | 37.00 | 41.30 |
| 13. C. solstitialis_TA1343_347529 | 71.30 | 71.90 | 72.10 | 36.50 | 71.10 | 72.60 | 56.40 | 70.40 |
| 14. C. tinctorius_TA1847_4222 | 44.20 | 44.40 | 44.80 | 28.20 | 44.20 | 46.20 | 40.40 | 42.20 |
| 15. G. hirsutum_TC91868 | 40.50 | 44.40 | 44.80 | 31.50 | 40.50 | 40.60 | 34.40 | 40.00 |
| 16. G. max_Glyma14g39620.1 | 69.60 | 68.90 | 69.80 | 35.30 | 69.80 | 71.00 | 57.80 | 68.20 |
| 17. H. annuus_TC31796 | 69.80 | 72.60 | 73.50 | 34.80 | 69.60 | 72.40 | 57.30 | 68.90 |
| 18. Ipomoea_batatas_AF234536 | 66.50 | 70.00 | 70.00 | 31.70 | 66.70 | 67.70 | 52.40 | 64.70 |
| 19. L. saligna_TA1747_75948 | 43.30 | 46.30 | 46.80 | 31.40 | 43.30 | 44.50 | 40.70 | 41.90 |
| 20. L. sativa_TC17902 | 57.30 | 62.10 | 62.60 | 25.80 | 57.30 | 59.40 | 52.80 | 57.00 |
| 21. M. truncatula_AC155282_17.4 | 68.30 | 70.00 | 71.00 | 34.90 | 68.50 | 69.60 | 56.20 | 64.90 |
| 22. P. euphratica_TA2890_75702 | 71.30 | 72.20 | 72.80 | 34.60 | 71.50 | 70.40 | 54.10 | 70.00 |
| 23. P. patens_124589 | 43.50 | 51.60 | 51.30 | 41.70 | 43.50 | 46.20 | 60.90 | 44.20 |
| 1. Os_SPA15like | 72.20 | 27.90 | 27.40 | 28.70 | 53.40 | 31.20 | 29.70 | 50.10 |
| 2. A. thaliana_AT1G66330.1 | 54.80 | 35.70 | 35.70 | 36.60 | 59.30 | 33.60 | 35.50 | 56.80 |
| 3. Arabidopsis_thaliana_AY086709 | 55.30 | 36.30 | 35.70 | 36.60 | 60.20 | 34.20 | 35.50 | 57.70 |
| 4. B. napus_TC82749 | 28.90 | 18.80 | 19.30 | 17.50 | 29.90 | 16.80 | 19.90 | 29.90 |
| 5. LOC_Os05g05600.1 | 72.20 | 27.90 | 27.40 | 28.70 | 53.20 | 31.20 | 29.70 | 50.30 |
| 6. LOC_Os05g05600.5 | 73.10 | 29.00 | 28.60 | 29.70 | 54.80 | 31.00 | 29.90 | 50.90 |
| 7. LOC_Os05g05600.6 | 55.10 | 18.90 | 18.60 | 17.50 | 45.70 | 21.20 | 18.80 | 46.20 |
| 8. S. bicolor_Sb05g026090.1 | 91.70 | 28.40 | 28.10 | 29.80 | 54.80 | 30.20 | 29.30 | 51.50 |
| 9. Zea_mays_EU956861 | | 27.40 | 27.10 | 28.70 | 53.10 | 29.30 | 28.80 | 51.50 |
| 10. C. clementina_DY280874 | 39.20 | | 95.90 | 91.10 | 34.10 | 50.30 | 62.40 | 33.00 |
| 11. C. clementina_DY297038 | 39.20 | 97.20 | | 89.10 | 33.40 | 49.70 | 61.20 | 32.30 |
| 12. C. clementina_TC487 | 41.60 | 92.70 | 91.70 | | 34.50 | 50.90 | 58.60 | 34.90 |
| 13. C. solstitialis_TA1343_347529 | 69.40 | 45.90 | 45.00 | 46.80 | | 61.40 | 33.10 | 53.20 |
| 14. C. tinctorius_TA1847_4222 | 41.90 | 68.40 | 67.20 | 66.70 | 63.20 | | 49.80 | 29.80 |
| 15. G. hirsutum_TC91868 | 39.00 | 73.30 | 71.40 | 69.60 | 43.60 | 68.00 | | 32.00 |
| 16. G. max_Glyma14g39620.1 | 67.40 | 47.20 | 46.50 | 49.50 | 70.10 | 42.20 | 40.30 | |
| 17. H. annuus_TC31796 | 68.70 | 47.00 | 46.30 | 48.20 | 87.70 | 59.70 | 45.30 | 70.00 |
| 18. Ipomoea_batatas_AF234536 | 63.20 | 49.00 | 50.20 | 51.90 | 74.00 | 51.70 | 46.90 | 67.50 |
| 19. L. saligna_TA1747_75948 | 42.10 | 66.60 | 66.60 | 64.40 | 59.40 | 87.20 | 66.60 | 42.60 |
| 20. L. sativa_TC17902 | 57.00 | 54.50 | 54.80 | 56.70 | 75.60 | 72.80 | 54.50 | 57.40 |
| 21. M. truncatula_AC155282_17.4 | 67.20 | 46.80 | 46.60 | 49.20 | 70.50 | 43.80 | 44.30 | 86.90 |
| 22. P. euphratica_TA2890_75702 | 69.80 | 51.30 | 50.90 | 53.30 | 76.70 | 47.80 | 46.30 | 78.00 |
| 23. P. patens_124589 | 44.30 | 40.70 | 41.40 | 41.60 | 47.50 | 38.10 | 38.70 | 47.70 |
| 1. Os_SPA15like | 52.50 | 52.60 | 30.30 | 42.90 | 50.40 | 53.00 | 33.00 | 33.50 |
| 2. A. thaliana_AT1G66330.1 | 58.40 | 56.10 | 35.50 | 49.40 | 55.60 | 61.60 | 37.80 | 38.20 |
| 3. Arabidopsis_thaliana_AY086709 | 59.50 | 57.20 | 36.40 | 50.30 | 55.90 | 62.10 | 37.60 | 38.90 |
| 4. B. napus_TC82749 | 30.20 | 25.60 | 17.50 | 19.00 | 29.10 | 29.30 | 27.90 | 28.50 |
| 5. LOC_Os05g05600.1 | 52.30 | 52.80 | 30.30 | 42.90 | 50.60 | 53.20 | 33.00 | 33.50 |
| 6. LOC_Os05g05600.5 | 53.70 | 53.00 | 30.90 | 43.90 | 49.90 | 53.00 | 35.00 | 35.50 |
| 7. LOC_Os05g05600.6 | 44.50 | 41.70 | 21.80 | 35.10 | 45.10 | 43.30 | 43.80 | 45.60 |
| 8. S. bicolor_Sb05g026090.1 | 52.10 | 51.00 | 30.50 | 44.00 | 51.10 | 54.70 | 32.90 | 33.00 |
| 9. Zea_mays_EU956861 | 52.00 | 51.20 | 29.40 | 42.80 | 49.90 | 54.50 | 32.60 | 32.30 |
| 10. C. clementina_DY280874 | 33.90 | 38.90 | 48.10 | 39.70 | 32.60 | 44.30 | 18.00 | 16.30 |
| 11. C. clementina_DY297038 | 32.80 | 38.50 | 48.40 | 39.40 | 31.90 | 43.70 | 18.30 | 17.90 |
| 12. C. clementina_TC487 | 34.20 | 40.30 | 48.40 | 40.50 | 34.60 | 44.80 | 18.20 | 15.60 |
| 13. C. solstitialis_TA1343_347529 | 80.60 | 60.80 | 54.20 | 69.40 | 52.30 | 60.60 | 35.50 | 36.20 |
| 14. C. tinctorius_TA1847_4222 | 51.80 | 42.40 | 78.50 | 65.40 | 31.40 | 37.10 | 21.40 | 21.50 |
| 15. G. hirsutum_TC91868 | 33.80 | 38.80 | 49.50 | 40.10 | 31.80 | 38.30 | 19.40 | 19.90 |
| 16. G. max_Glyma14g39620.1 | 53.50 | 54.50 | 30.60 | 43.00 | 80.20 | 64.10 | 35.90 | 35.30 |
| 17. H. annuus_TC31796 | | 60.40 | 53.50 | 68.80 | 53.00 | 59.10 | 37.10 | 38.30 |
| 18. Ipomoea_batatas_AF234536 | 75.50 | | 41.20 | 55.70 | 52.80 | 56.10 | 34.10 | 33.30 |
| 19. L. saligna_TA1747_75948 | 59.40 | 50.20 | | 79.50 | 30.30 | 35.70 | 20.60 | 20.40 |
| 20. L. sativa_TC17902 | 75.90 | 66.40 | 80.10 | | 42.80 | 48.70 | 26.80 | 27.40 |
| 21. M. truncatula_AC155282_17.4 | 71.00 | 67.20 | 43.80 | 58.80 | | 62.00 | 35.60 | 36.20 |
| 22. P. euphratica_TA2890_75702 | 72.40 | 67.00 | 46.30 | 60.90 | 75.90 | | 33.60 | 33.50 |
| 23. P. patens_124589 | 49.90 | 46.90 | 38.70 | 44.40 | 48.20 | 46.10 | | 79.90 |

### Example 4

### Identification of Domains Comprised in Polypeptide Sequences Useful in Performing the Methods of the Invention

### 4.1 O-FUT-Like Polypeptides

[0583] The Integrated Resource of Protein Families, Domains and Sites (InterPro) database is an integrated interface for the commonly used signature databases for text- and sequence-based searches. The InterPro database combines these databases, which use different methodologies and varying degrees of biological information about well-characterized proteins to derive protein signatures. Collaborating databases include SWISS-PROT, PROSITE, TrEMBL, PRINTS, ProDom and Pfam, Smart and TIGRFAMs. Pfam is a large collection of multiple sequence alignments and hidden Markov models covering many common protein domains and families. Pfam is hosted at the Sanger Institute server in the United Kingdom. Interpro is hosted at the European Bioinformatics Institute in the United Kingdom.

[0584] The results of the InterPro scan of the polypeptide sequence as represented by SEQ ID NO: 2 are presented in Table B1.

TABLE B1
InterPro scan results (major accession numbers) of the polypeptide
sequence as represented by SEQ ID NO: 2.

| | | | | Size Full Length |
|---|---|---|---|---|
| | Accession | Accession | Size | ortholog SEQ ID |
| Database | number | name | SEQ ID NO 2 | NO 21 |
| PFam | PF03138 | O-FucT | 355 | 574 |

### 4.2 By-Pass (BPS) Polypeptides

[0585] The Integrated Resource of Protein Families, Domains and Sites (InterPro) database is an integrated interface for the commonly used signature databases for text- and sequence-based searches. The InterPro database combines these databases, which use different methodologies and varying degrees of biological information about well-characterized proteins to derive protein signatures. Collaborating databases include SWISS-PROT, PROSITE, TrEMBL, PRINTS, ProDom and Pfam, Smart and TIGRFAMs. Pfam is a large collection of multiple sequence alignments and hidden Markov models covering many common protein domains and families. Pfam is hosted at the Sanger Institute server in the United Kingdom. Interpro is hosted at the European Bioinformatics Institute in the United Kingdom.

### 4.3 SIZ1 Polypeptides

[0586] The Integrated Resource of Protein Families, Domains and Sites (InterPro) database is an integrated interface for the commonly used signature databases for text- and sequence-based searches. The InterPro database combines these databases, which use different methodologies and varying degrees of biological information about well-characterized proteins to derive protein signatures. Collaborating databases include SWISS-PROT, PROSITE, TrEMBL, PRINTS, ProDom and Pfam, Smart and TIGRFAMs. Pfam is a large collection of multiple sequence alignments and hidden Markov models covering many common protein domains and families. Pfam is hosted at the Sanger Institute server in the United Kingdom. Interpro is hosted at the European Bioinformatics Institute in the United Kingdom.

[0587] The results of the InterPro scan of the polypeptide sequence as represented by SEQ ID NO: 353 are presented in Table C3.

TABLE C3
InterPro scan results (major accession numbers) of the
polypeptide sequence as represented by SEQ ID NO: 354.

| | | | Average size on |
|---|---|---|---|
| Database | Accession number | Accession name | SEQ ID NO 354 |
| PFam | PF02037 | SAP | 34 |
| PFam | PF00628 | PHD | 54 |
| PFam | PF02891 | zf-MIZ | 49 |

4.4 bZIP-S Polypeptides

[0588] The Integrated Resource of Protein Families, Domains and Sites (InterPro) database is an integrated interface for the commonly used signature databases for text- and sequence-based searches. The InterPro database combines these databases, which use different methodologies and varying degrees of biological information about well-characterized proteins to derive protein signatures. Collaborating databases include SWISS-PROT, PROSITE, TrEMBL, PRINTS, ProDom and Pfam, Smart and TIGRFAMs. Pfam is a large collection of multiple sequence alignments and hidden Markov models covering many common protein domains and families. Pfam is hosted at the Sanger Institute server in the United Kingdom. Interpro is hosted at the European Bioinformatics Institute in the United Kingdom.

[0589] The results of the InterPro scan of the polypeptide sequence as represented by SEQ ID NO: 422 are presented in Table C4.

TABLE C4
InterPro scan results (major accession numbers) of the polypeptide sequence as represented by SEQ ID NO: 422.

| | | | start | stop | E-value | | |
|---|---|---|---|---|---|---|---|
| PatternScan | PS00036 | BZIP_BASIC | 33 | 48 | NA | IPR004827 | Basic-leucine zipper (bZIP), |
| | | | | | | | transcriptionfactor |
| HMMSmart | SM00338 | BRLZ | 26 | 90 | 1.80E−17 | IPR004827 | Basic-leucine zipper (bZIP), |
| | | | | | | | transcriptionfactor |
| HMMPfam | PF00170 | bZIP_1 | 28 | 89 | 1.20E−08 | IPR011616 | Basic-leucine zipper (bZIP), |
| | | | | | | | transcriptionfactor |
| ProfileScan | PS50217 | BZIP | 28 | 91 | 10.53 | IPR004827 | Basic-leucine zipper (bZIP), |
| | | | | | | | transcriptionfactor |
| HMMPanther | PTHR19304:SF2 | ATF31-YEAST | 38 | 75 | 0.00054 | NULL | NULL |

### 4.5 SPA15-Like Polypeptides

[0590] The Integrated Resource of Protein Families, Domains and Sites (InterPro) database is an integrated interface for the commonly used signature databases for text- and sequence-based searches. The InterPro database combines these databases, which use different methodologies and varying degrees of biological information about well-characterized proteins to derive protein signatures. Collaborating databases include SWISS-PROT, PROS ITE, TrEMBL, PRINTS, ProDom and Pfam, Smart and TIGRFAMs. Pfam is a large collection of multiple sequence alignments and hidden Markov models covering many common protein domains and families. Pfam is hosted at the Sanger Institute server in the United Kingdom. Interpro is hosted at the European Bioinformatics Institute in the United Kingdom.

[0591] The results of the InterPro scan of the polypeptide sequence as represented by SEQ ID NO: 634 are presented in Table C5.

TABLE C5
InterPro scan results (major accession numbers) of the
polypeptide sequence as represented by SEQ ID NO: 634

| | | | Amino acid | |
|---|---|---|---|---|
| | | | coordinates on | |
| | Accession | | SEQ ID NO 634 | |
| Database | number | Accession name | start | stop |
| superfamily | SSF46785 | “Winged helix” | 37 | 106 |
| | | DNA-binding domain | | |
| superfamily | SSF48371 | ARM repeat | 308 | 421 |

### Example 5

### Topology Prediction of the Polypeptide Sequences Useful in Performing the Methods of Invention

### 5.1 O-FUT-Like Polypeptides & 5.2 By-Pass (BPS) Polypeptides & 5.3 SIZ1 Polypeptides

[0592] TargetP 1.1 predicts the subcellular location of eukaryotic proteins. The location assignment is based on the predicted presence of any of the N-terminal pre-sequences: chloroplast transit peptide (cTP), mitochondrial targeting peptide (mTP) or secretory pathway signal peptide (SP). Scores on which the final prediction is based are not really probabilities, and they do not necessarily add to one. However, the location with the highest score is the most likely according to TargetP, and the relationship between the scores (the reliability class) may be an indication of how certain the prediction is. The reliability class (RC) ranges from 1 to 5, where 1 indicates the strongest prediction. TargetP is maintained at the server of the Technical University of Denmark.

[0593] For the sequences predicted to contain an N-terminal presequence a potential cleavage site can also be predicted.

[0594] A number of parameters are selected, such as organism group (non-plant or plant), cutoff sets (none, predefined set of cutoffs, or user-specified set of cutoffs), and the calculation of prediction of cleavage sites (yes or no).

[0595] Many other algorithms can be used to perform such analyses, including:
[0596] ChloroP 1.1 hosted on the server of the Technical University of Denmark;
[0597] Protein Prowler Subcellular Localisation Predictor version 1.2 hosted on the server of the Institute for Molecular Bioscience, University of Queensland, Brisbane, Australia;
[0598] PENCE Proteome Analyst PA-GOSUB 2.5 hosted on the server of the University of Alberta, Edmonton, Alberta, Canada;
[0599] TMHMM, hosted on the server of the Technical University of Denmark
[0600] PSORT (URL: psort.org)
[0601] PLOC (Park and Kanehisa, Bioinformatics, 19, 1656-1663, 2003).
   5.4 bZIP-S Polypeptides

[0602] TargetP 1.1 predicts the subcellular location of eukaryotic proteins. The location assignment is based on the predicted presence of any of the N-terminal pre-sequences: chloroplast transit peptide (cTP), mitochondrial targeting peptide (mTP) or secretory pathway signal peptide (SP). Scores on which the final prediction is based are not really probabilities, and they do not necessarily add to one. However, the location with the highest score is the most likely according to TargetP, and the relationship between the scores (the reliability class) may be an indication of how certain the prediction is. The reliability class (RC) ranges from 1 to 5, where 1 indicates the strongest prediction. TargetP is maintained at the server of the Technical University of Denmark.

[0603] For the sequences predicted to contain an N-terminal presequence a potential cleavage site can also be predicted.

[0604] A number of parameters are selected, such as organism group (non-plant or plant), cutoff sets (none, predefined set of cutoffs, or user-specified set of cutoffs), and the calculation of prediction of cleavage sites (yes or no).

[0605] The “plant” organism group is selected, no cutoffs defined, and the predicted length of the transit peptide requested.

[0606] Many other algorithms can be used to perform such analyses, including:
[0607] ChloroP 1.1 hosted on the server of the Technical University of Denmark;
[0608] Protein Prowler Subcellular Localisation Predictor version 1.2 hosted on the server of the Institute for Molecular Bioscience, University of Queensland, Brisbane, Australia;
[0609] PENCE Proteome Analyst PA-GOSUB 2.5 hosted on the server of the University of Alberta, Edmonton, Alberta, Canada;
[0610] TMHMM, hosted on the server of the Technical University of Denmark
[0611] PSORT (URL: psort.org)
[0612] PLOC (Park and Kanehisa, Bioinformatics, 19, 1656-1663, 2003).

### 5.5 SPA15-Like Polypeptides

[0613] TargetP 1.1 predicts the subcellular location of eukaryotic proteins. The location assignment is based on the predicted presence of any of the N-terminal pre-sequences: chloroplast transit peptide (cTP), mitochondrial targeting peptide (mTP) or secretory pathway signal peptide (SP). Scores on which the final prediction is based are not really probabilities, and they do not necessarily add to one. However, the location with the highest score is the most likely according to TargetP, and the relationship between the scores (the reliability class) may be an indication of how certain the prediction is. The reliability class (RC) ranges from 1 to 5, where 1 indicates the strongest prediction. TargetP is maintained at the server of the Technical University of Denmark.

[0614] For the sequences predicted to contain an N-terminal presequence a potential cleavage site can also be predicted.

[0615] A number of parameters are selected, such as organism group, cutoff sets (none, predefined set of cutoffs, or user-specified set of cutoffs), and the calculation of prediction of cleavage sites (yes or no).

[0616] The “plant” organism group is selected, no cutoffs defined, and the predicted length of the transit peptide requested. The subcellular localization of the polypeptide sequence as represented by SEQ ID NO: 634 may be the cell wall, no transit peptide is predicted.

[0617] Many other algorithms can be used to perform such analyses, including:
[0618] ChloroP 1.1 hosted on the server of the Technical University of Denmark;
[0619] Protein Prowler Subcellular Localisation Predictor version 1.2 hosted on the server of the Institute for Molecular Bioscience, University of Queensland, Brisbane, Australia;
[0620] PENCE Proteome Analyst PA-GOSUB 2.5 hosted on the server of the University of Alberta, Edmonton, Alberta, Canada;
[0621] TMHMM, hosted on the server of the Technical University of Denmark
[0622] PSORT (URL: psort.org)
[0623] PLOC (Park and Kanehisa, Bioinformatics, 19, 1656-1663, 2003).

### Example 6

### Assay Related to the Polypeptide Sequences Useful in Performing the Methods of the Invention

[0624] Reference is made to Van Norman et al. (2004)—BYPASS1 Negatively Regulates a Root-Derived Signal that Controls Plant Architecture. Current Biology, Vol. 14, 1739-1746, Oct. 15, 2004

### Example 7

### Cloning of the Nucleic Acid Sequence Used in Methods of the Invention

### 7.1 O-FUT-Like Polypeptides

[0625] The nucleic acid sequence was amplified by PCR using as template a custom-made Oryza sativa seedlings cDNA library (in pCMV Sport 6.0; Invitrogen, Paisley, UK). PCR was performed using Hifi Taq DNA polymerase in standard conditions, using 200 ng of template in a 50 μl PCR mix. The primers used were prm1403 (SEQ ID NO: 265; sense, start codon in bold): 5′-ggggacaagtttgtacaaaaaagcaggcttaaacaatggaccaatcactcaagtgg-3′ and prm 14039 (SEQ ID NO: 266; reverse, complementary): 5′-ggggaccactttgtacaagaaagctgggttcctcttcataacaa atcagcg-3′, which include the AttB sites for Gateway recombination. The amplified PCR fragment was purified also using standard methods. The first step of the Gateway procedure, the BP reaction, was then performed, during which the PCR fragment recombined in vivo with the pDONR201 plasmid to produce, according to the Gateway terminology, an “entry clone”, pO-FUT. Plasmid pDONR201 was purchased from Invitrogen, as part of the Gateway® technology.

[0626] The entry clone comprising SEQ ID NO: 1 was then used in an LR reaction with a destination vector used for Oryza sativa transformation. This vector contained as functional elements within the T-DNA borders: a plant selectable marker; a screenable marker expression cassette; and a Gateway cassette intended for LR in vivo recombination with the nucleic acid sequence of interest already cloned in the entry clone. A rice GOS2 promoter (SEQ ID NO: 264) for constitutive specific expression was located upstream of this Gateway cassette.

[0627] After the LR recombination step, the resulting expression vector pGOS2::O-FUT (FIG. 4) was transformed into Agrobacterium strain LBA4044 according to methods well known in the art.

### 7.2 By-Pass (BPS) Polypeptides

[0628] The nucleic acid sequence was amplified by PCR using as template a custom-made Arabidopsis thaliana seedlings cDNA library (in pCMV Sport 6.0; Invitrogen, Paisley, UK). PCR was performed using Hifi Taq DNA polymerase in standard conditions, using 200 ng of template in a 50 μl PCR mix.

[0629] The primers used were prm13550 (SEQ ID NO: 351 sense, start codon in bold): 5′-ggggac aagtttgtacaaaaaagcaggcttaaacaatggctcgtccacaagac-3′ and prm13551 (SEQ ID NO: 352; reverse, complementary): 5′-ggggaccactttgtacaagaaagctgggtgaagtaaaaccatctgtacaaaca-3′, which include the AttB sites for Gateway recombination. The amplified PCR fragment was purified also using standard methods. The first step of the Gateway procedure, the BP reaction, was then performed, during which the PCR fragment recombined in vivo with the pDONR201 plasmid to produce, according to the Gateway terminology, an “entry clone”, pBPS. Plasmid pDONR201 was purchased from Invitrogen, as part of the Gateway® technology.

[0630] The entry clone comprising SEQ ID NO: 367 was then used in an LR reaction with a destination vector used for Oryza sativa transformation. This vector contained as functional elements within the T-DNA borders: a plant selectable marker; a screenable marker expression cassette; and a Gateway cassette intended for LR in vivo recombination with the nucleic acid sequence of interest already cloned in the entry clone. A rice GOS2 promoter (SEQ ID NO: 350) for constitutive specific expression was located upstream of this Gateway cassette.

[0631] After the LR recombination step, the resulting expression vector pGOS2::BPS (FIG. 7) was transformed into Agrobacterium strain LBA4044 according to methods well known in the art.

### 7.3 SIZ1 Polypeptides

[0632] The nucleic acid sequence was amplified by PCR using as template a custom-made Arabidopsis thaliana seedlings cDNA library (in pCMV Sport 6.0; Invitrogen, Paisley, UK). PCR was performed using Hifi Taq DNA polymerase in standard conditions, using 200 ng of template in a 50 μl PCR mix. The primers used were prm13568 (SEQ ID NO: 419; sense, start codon in bold): 5′-ggggacaagtttgtacaaaaaagcaggcttaaacaatggatttggaagctaattgt-3′ and prm13569 (SEQ ID NO: 420; reverse, complementary): 5′-ggggaccactttgtacaagaaagctg ggtcaacagaacagacaaatcagg-3′, which include the AttB sites for Gateway recombination. The amplified PCR fragment was purified also using standard methods. The first step of the Gateway procedure, the BP reaction, was then performed, during which the PCR fragment recombined in vivo with the pDONR201 plasmid to produce, according to the Gateway terminology, an “entry clone”, pSIZ1. Plasmid pDONR201 was purchased from Invitrogen, as part of the Gateway® technology.

[0633] The entry clone comprising SEQ ID NO: 353 was then used in an LR reaction with a destination vector used for Oryza sativa transformation. This vector contained as functional elements within the T-DNA borders: a plant selectable marker; a screenable marker expression cassette; and a Gateway cassette intended for LR in vivo recombination with the nucleic acid sequence of interest already cloned in the entry clone. A rice GOS2 promoter (SEQ ID NO: 418) for constitutive specific expression was located upstream of this Gateway cassette.

[0634] After the LR recombination step, the resulting expression vector pG0S2::SIZ1 (FIG. 10) was transformed into Agrobacterium strain LBA4044 according to methods well known in the art.

7.4 bZIP-S Polypeptides

[0635] The nucleic acid sequence was amplified by PCR using as template a custom-made Medicago truncatula seedlings cDNA library (in pCMV Sport 6.0; Invitrogen, Paisley, UK). PCR was performed using Hifi Taq DNA polymerase in standard conditions, using 200 ng of template in a 50 μl PCR mix. The primers used were as represented by SEQ ID NO: 627 (sense) and SEQ ID NO: 628 (reverse, complementary which include the AttB sites for Gateway recombination). The amplified PCR fragment was purified also using standard methods. The first step of the Gateway procedure, the BP reaction, was then performed, during which the PCR fragment recombined in vivo with the pDONR201 plasmid to produce, according to the Gateway terminology, an “entry clone”, pbZIP-S. Plasmid pDONR201 was purchased from Invitrogen, as part of the Gateway® technology.

[0636] The entry clone comprising SEQ ID NO: 421 was then used in an LR reaction with a destination vector used for Oryza sativa transformation. This vector contained as functional elements within the T-DNA borders: a plant selectable marker; a screenable marker expression cassette; and a Gateway cassette intended for LR in vivo recombination with the nucleic acid sequence of interest already cloned in the entry clone. A rice GOS2 promoter (SEQ ID NO: 629) for constitutive specific expression was located upstream of this Gateway cassette.

[0637] After the LR recombination step, the resulting expression vector pGOS2::bZIP-S (FIG. 13) was transformed into Agrobacterium strain LBA4044 according to methods well known in the art.

### 7.5 SPA15-Like Polypeptides

[0638] The nucleic acid sequence was amplified by PCR using as template a custom-made Oryza sativa seedlings cDNA library (in pCMV Sport 6.0; Invitrogen, Paisley, UK). PCR was performed using Hifi Taq DNA polymerase in standard conditions, using 200 ng of template in a 50 μl PCR mix. The primers used were prm12099 (SEQ ID NO: 701; sense, start codon in bold): 5′-ggggacaagtttgtacaaaaaagcaggcttaaacaatggctactcgcattcctg-3′ and prm12100 (SEQ ID NO: 702; reverse, complementary): 5′-ggggaccactttgtacaagaaagctgggtttcttatttgcacatgatcacc-3′, which include the AttB sites for Gateway recombination. The amplified PCR fragment was purified also using standard methods. The first step of the Gateway procedure, the BP reaction, was then performed, during which the PCR fragment recombined in vivo with the pDONR201 plasmid to produce, according to the Gateway terminology, an “entry clone”, pSPA15-like. Plasmid pDONR201 was purchased from Invitrogen, as part of the Gateway® technology.

[0639] The entry clone comprising SEQ ID NO: 633 was then used in an LR reaction with a destination vector used for Oryza sativa transformation. This vector contained as functional elements within the T-DNA borders: a plant selectable marker; a screenable marker expression cassette; and a Gateway cassette intended for LR in vivo recombination with the nucleic acid sequence of interest already cloned in the entry clone. A rice GOS2 promoter (SEQ ID NO: 700) for constitutive specific expression was located upstream of this Gateway cassette.

[0640] After the LR recombination step, the resulting expression vector pGOS2::SPA15-like (FIG. 17) was transformed into Agrobacterium strain LBA4044 according to methods well known in the art.

### Example 8

### Plant Transformation

### Rice Transformation

[0641] The Agrobacterium containing the expression vector was used to transform Oryza sativa plants. Mature dry seeds of the rice japonica cultivar Nipponbare were dehusked. Sterilization was carried out by incubating for one minute in 70% ethanol, followed by 30 minutes in 0.2% HgCl₂, followed by a 6 times 15 minutes wash with sterile distilled water. The sterile seeds were then germinated on a medium containing 2,4-D (callus induction medium). After incubation in the dark for four weeks, embryogenic, scutellum-derived calli were excised and propagated on the same medium. After two weeks, the calli were multiplied or propagated by subculture on the same medium for another 2 weeks. Embryogenic callus pieces were sub-cultured on fresh medium 3 days before co-cultivation (to boost cell division activity).

[0642] Agrobacterium strain LBA4404 containing the expression vector was used for co-cultivation. Agrobacterium was inoculated on AB medium with the appropriate antibiotics and cultured for 3 days at 28° C. The bacteria were then collected and suspended in liquid co-cultivation medium to a density (OD₆₀₀) of about 1. The suspension was then transferred to a Petri dish and the calli immersed in the suspension for 15 minutes. The callus tissues were then blotted dry on a filter paper and transferred to solidified, co-cultivation medium and incubated for 3 days in the dark at 25° C. Co-cultivated calli were grown on 2,4-D-containing medium for 4 weeks in the dark at 28° C. in the presence of a selection agent. During this period, rapidly growing resistant callus islands developed. After transfer of this material to a regeneration medium and incubation in the light, the embryogenic potential was released and shoots developed in the next four to five weeks. Shoots were excised from the calli and incubated for 2 to 3 weeks on an auxin-containing medium from which they were transferred to soil. Hardened shoots were grown under high humidity and short days in a greenhouse.

[0643] Approximately 35 independent TO rice transformants were generated for one construct. The primary transformants were transferred from a tissue culture chamber to a greenhouse. After a quantitative PCR analysis to verify copy number of the T-DNA insert, only single copy transgenic plants that exhibit tolerance to the selection agent were kept for harvest of T1 seed. Seeds were then harvested three to five months after transplanting. The method yielded single locus transformants at a rate of over 50% (Aldemita and Hodges 1996, Chan et al. 1993, Hiei et al. 1994).

### Example 9

### Transformation of Other Crops

### Corn Transformation

[0644] Transformation of maize (Zea mays) is performed with a modification of the method described by Ishida et al. (1996) Nature Biotech 14(6): 745-50. Transformation is genotype-dependent in corn and only specific genotypes are amenable to transformation and regeneration. The inbred line A188 (University of Minnesota) or hybrids with A188 as a parent are good sources of donor material for transformation, but other genotypes can be used successfully as well. Ears are harvested from corn plant approximately 11 days after pollination (DAP) when the length of the immature embryo is about 1 to 1.2 mm. Immature embryos are cocultivated with Agrobacterium tumefaciens containing the expression vector, and transgenic plants are recovered through organogenesis. Excised embryos are grown on callus induction medium, then maize regeneration medium, containing the selection agent (for example imidazolinone but various selection markers can be used). The Petri plates are incubated in the light at 25° C. for 2-3 weeks, or until shoots develop. The green shoots are transferred from each embryo to maize rooting medium and incubated at 25° C. for 2-3 weeks, until roots develop. The rooted shoots are transplanted to soil in the greenhouse. T1 seeds are produced from plants that exhibit tolerance to the selection agent and that contain a single copy of the T-DNA insert.

### Wheat Transformation

[0645] Transformation of wheat is performed with the method described by Ishida et al. (1996) Nature Biotech 14(6): 745-50. The cultivar Bobwhite (available from CIMMYT, Mexico) is commonly used in transformation. Immature embryos are co-cultivated with Agrobacterium tumefaciens containing the expression vector, and transgenic plants are recovered through organogenesis. After incubation with Agrobacterium, the embryos are grown in vitro on callus induction medium, then regeneration medium, containing the selection agent (for example imidazolinone but various selection markers can be used). The Petri plates are incubated in the light at 25° C. for 2-3 weeks, or until shoots develop. The green shoots are transferred from each embryo to rooting medium and incubated at 25° C. for 2-3 weeks, until roots develop. The rooted shoots are transplanted to soil in the greenhouse. T1 seeds are produced from plants that exhibit tolerance to the selection agent and that contain a single copy of the T-DNA insert.

### Soybean Transformation

[0646] Soybean is transformed according to a modification of the method described in the Texas A&M U.S. Pat. No. 5,164,310. Several commercial soybean varieties are amenable to transformation by this method. The cultivar Jack (available from the Illinois Seed foundation) is commonly used for transformation. Soybean seeds are sterilised for in vitro sowing. The hypocotyl, the radicle and one cotyledon are excised from seven-day old young seedlings. The epicotyl and the remaining cotyledon are further grown to develop axillary nodes. These axillary nodes are excised and incubated with Agrobacterium tumefaciens containing the expression vector. After the cocultivation treatment, the explants are washed and transferred to selection media. Regenerated shoots are excised and placed on a shoot elongation medium. Shoots no longer than 1 cm are placed on rooting medium until roots develop. The rooted shoots are transplanted to soil in the greenhouse. T1 seeds are produced from plants that exhibit tolerance to the selection agent and that contain a single copy of the T-DNA insert.

### Rapeseed/Canola Transformation

[0647] Cotyledonary petioles and hypocotyls of 5-6 day old young seedling are used as explants for tissue culture and transformed according to Babic et al. (1998, Plant Cell Rep 17: 183-188). The commercial cultivar Westar (Agriculture Canada) is the standard variety used for transformation, but other varieties can also be used. Canola seeds are surface-sterilized for in vitro sowing. The cotyledon petiole explants with the cotyledon attached are excised from the in vitro seedlings, and inoculated with Agrobacterium (containing the expression vector) by dipping the cut end of the petiole explant into the bacterial suspension. The explants are then cultured for 2 days on MSBAP-3 medium containing 3 mg/l BAP, 3% sucrose, 0.7% Phytagar at 23° C., 16 hr light. After two days of co-cultivation with Agrobacterium, the petiole explants are transferred to MSBAP-3 medium containing 3 mg/l BAP, cefotaxime, carbenicillin, or timentin (300 mg/l) for 7 days, and then cultured on MSBAP-3 medium with cefotaxime, carbenicillin, or timentin and selection agent until shoot regeneration. When the shoots are 5-10 mm in length, they are cut and transferred to shoot elongation medium (MSBAP-0.5, containing 0.5 mg/l BAP). Shoots of about 2 cm in length are transferred to the rooting medium (MS0) for root induction. The rooted shoots are transplanted to soil in the greenhouse. T1 seeds are produced from plants that exhibit tolerance to the selection agent and that contain a single copy of the T-DNA insert.

### Alfalfa Transformation

[0648] A regenerating clone of alfalfa (Medicago sativa) is transformed using the method of (McKersie et al., 1999 Plant Physiol 119: 839-847). Regeneration and transformation of alfalfa is genotype dependent and therefore a regenerating plant is required. Methods to obtain regenerating plants have been described. For example, these can be selected from the cultivar Rangelander (Agriculture Canada) or any other commercial alfalfa variety as described by Brown D C W and A Atanassov (1985. Plant Cell Tissue Organ Culture 4: 111-112). Alternatively, the RA3 variety (University of Wisconsin) has been selected for use in tissue culture (Walker et al., 1978 μm J Bot 65:654-659). Petiole explants are cocultivated with an overnight culture of Agrobacterium tumefaciens C58C1 pMP90 (McKersie et al., 1999 Plant Physiol 119: 839-847) or LBA4404 containing the expression vector. The explants are cocultivated for 3 d in the dark on SH induction medium containing 288 mg/L Pro, 53 mg/L thioproline, 4.35 g/L K2SO4, and 100 μm acetosyringinone. The explants are washed in half-strength Murashige-Skoog medium (Murashige and Skoog, 1962) and plated on the same SH induction medium without acetosyringinone but with a suitable selection agent and suitable antibiotic to inhibit Agrobacterium growth. After several weeks, somatic embryos are transferred to BOi2Y development medium containing no growth regulators, no antibiotics, and 50 g/L sucrose. Somatic embryos are subsequently germinated on half-strength Murashige-Skoog medium. Rooted seedlings were transplanted into pots and grown in a greenhouse. T1 seeds are produced from plants that exhibit tolerance to the selection agent and that contain a single copy of the T-DNA insert.

### Cotton Transformation

[0649] Cotton is transformed using Agrobacterium tumefaciens according to the method described in U.S. Pat. No. 5,159,135. Cotton seeds are surface sterilised in 3% sodium hypochlorite solution during 20 minutes and washed in distilled water with 500 μg/ml cefotaxime. The seeds are then transferred to SH-medium with 50 μg/ml benomyl for germination. Hypocotyls of 4 to 6 days old seedlings are removed, cut into 0.5 cm pieces and are placed on 0.8% agar. An Agrobacterium suspension (approx. 108 cells per ml, diluted from an overnight culture transformed with the gene of interest and suitable selection markers) is used for inoculation of the hypocotyl explants. After 3 days at room temperature and lighting, the tissues are transferred to a solid medium (1.6 g/l Gelrite) with Murashige and Skoog salts with B5 vitamins (Gamborg et al., Exp. Cell Res. 50:151-158 (1968)), 0.1 mg/l 2,4-D, 0.1 mg/l 6-furfurylaminopurine and 750 μg/ml MgCL2, and with 50 to 100 μg/ml cefotaxime and 400-500 μg/ml carbenicillin to kill residual bacteria. Individual cell lines are isolated after two to three months (with subcultures every four to six weeks) and are further cultivated on selective medium for tissue amplification (30° C., 16 hr photoperiod). Transformed tissues are subsequently further cultivated on non-selective medium during 2 to 3 months to give rise to somatic embryos. Healthy looking embryos of at least 4 mm length are transferred to tubes with SH medium in fine vermiculite, supplemented with 0.1 mg/l indole acetic acid, 6 furfurylaminopurine and gibberellic acid. The embryos are cultivated at 30° C. with a photoperiod of 16 hrs, and plantlets at the 2 to 3 leaf stage are transferred to pots with vermiculite and nutrients. The plants are hardened and subsequently moved to the greenhouse for further cultivation.

### Example 10

### Phenotypic Evaluation Procedure

### 10.1 Evaluation Setup

[0650] Approximately 35 independent T0 rice transformants were generated. The primary transformants were transferred from a tissue culture chamber to a greenhouse for growing and harvest of T1 seed. Six events, of which the T1 progeny segregated 3:1 for presence/absence of the transgene, were retained. For each of these events, approximately 10 T1 seedlings containing the transgene (hetero- and homo-zygotes) and approximately 10 T1 seedlings lacking the transgene (nullizygotes) were selected by monitoring visual marker expression. The transgenic plants and the corresponding nullizygotes were grown side-by-side at random positions. Greenhouse conditions were of shorts days (12 hours light), 28° C. in the light and 22° C. in the dark, and a relative humidity of 70%. Plants grown under non-stress conditions were watered at regular intervals to ensure that water and nutrients were not limiting and to satisfy plant needs to complete growth and development.

### Drought Screen

[0651] Plants from T2 seeds are grown in potting soil under normal conditions until they approached the heading stage. They are then transferred to a “dry” section where irrigation is withheld. Humidity probes are inserted in randomly chosen pots to monitor the soil water content (SWC). When SWC goes below certain thresholds, the plants are automatically re-watered continuously until a normal level is reached again. The plants are then re-transferred again to normal conditions. The rest of the cultivation (plant maturation, seed harvest) is the same as for plants not grown under abiotic stress conditions. Growth and yield parameters are recorded as detailed for growth under normal conditions.

### Nitrogen Use Efficiency Screen

[0652] Rice plants from T2 seeds are grown in potting soil under normal conditions except for the nutrient solution. The pots are watered from transplantation to maturation with a specific nutrient solution containing reduced N nitrogen (N) content, usually between 7 to 8 times less. The rest of the cultivation (plant maturation, seed harvest) is the same as for plants not grown under abiotic stress. Growth and yield parameters are recorded as detailed for growth under normal conditions.

### Salt Stress Screen

[0653] Plants are grown on a substrate made of coco fibers and argex (3 to 1 ratio). A normal nutrient solution is used during the first two weeks after transplanting the plantlets in the greenhouse. After the first two weeks, 25 mM of salt (NaCl) is added to the nutrient solution, until the plants are harvested. Seed-related parameters are then measured.

### 10.2 Statistical Analysis: F Test

[0654] A two factor ANOVA (analysis of variants) was used as a statistical model for the overall evaluation of plant phenotypic characteristics. An F test was carried out on all the parameters measured of all the plants of all the events transformed with the gene of the present invention. The F test was carried out to check for an effect of the gene over all the transformation events and to verify for an overall effect of the gene, also known as a global gene effect. The threshold for significance for a true global gene effect was set at a 5% probability level for the F test. A significant F test value points to a gene effect, meaning that it is not only the mere presence or position of the gene that is causing the differences in phenotype.

### 10.3 Parameters Measured

### Biomass-Related Parameter Measurement

[0655] From the stage of sowing until the stage of maturity the plants were passed several times through a digital imaging cabinet. At each time point digital images (2048×1536 pixels, 16 million colours) were taken of each plant from at least 6 different angles.

[0656] The plant aboveground area (or leafy biomass) was determined by counting the total number of pixels on the digital images from aboveground plant parts discriminated from the background. This value was averaged for the pictures taken on the same time point from the different angles and was converted to a physical surface value expressed in square mm by calibration. Experiments show that the aboveground plant area measured this way correlates with the biomass of plant parts above ground. The above ground area is the area measured at the time point at which the plant had reached its maximal leafy biomass. The early vigour is the plant (seedling) aboveground area three weeks post-germination. Increase in root biomass is expressed as an increase in total root biomass (measured as maximum biomass of roots observed during the lifespan of a plant); or as an increase in the root/shoot index (measured as the ratio between root mass and shoot mass in the period of active growth of root and shoot).

[0657] Early vigour was determined by counting the total number of pixels from aboveground plant parts discriminated from the background. This value was averaged for the pictures taken on the same time point from different angles and was converted to a physical surface value expressed in square mm by calibration. The results described below are for plants three weeks post-germination.

### Seed-Related Parameter Measurements

[0658] The mature primary panicles were harvested, counted, bagged, barcode-labelled and then dried for three days in an oven at 37° C. The panicles were then threshed and all the seeds were collected and counted. The filled husks were separated from the empty ones using an air-blowing device. The empty husks were discarded and the remaining fraction was counted again. The filled husks were weighed on an analytical balance. The number of filled seeds was determined by counting the number of filled husks that remained after the separation step. The total seed yield was measured by weighing all filled husks harvested from a plant. Total seed number per plant was measured by counting the number of husks harvested from a plant. Thousand Kernel Weight (TKW) is extrapolated from the number of filled seeds counted and their total weight. The Harvest Index (HI) in the present invention is defined as the ratio between the total seed yield and the above ground area (mm²), multiplied by a factor 10⁶. The total number of flowers per panicle as defined in the present invention is the ratio between the total number of seeds and the number of mature primary panicles. The seed fill rate as defined in the present invention is the proportion (expressed as a %) of the number of filled seeds over the total number of seeds (or florets).

### Example 11

### Phenotypic Evaluation Procedure

### 11.1 O-FUT-Like Polypeptides

[0659] The results of the evaluation of transgenic rice plants under non-stress conditions are presented below. An increase of more than 5% was observed for aboveground biomass (AreaMax), emergence vigour (early vigour), total seed yield, number of filled seeds, fill rate, number of flowers per panicle, harvest index, and of (2.5-3) % for thousand kernel weight

TABLE C1
Data summary for transgenic rice plants; for each parameter,
the overall percent increase is shown for each parameter the
p-value is <0.05.

| Parameter | Overall |
|---|---|
| AreaMax | 7.1 |
| totalwgseeds | 22.6 |
| fillrate | 8.3 |
| harvestindex | 13.8 |
| nrfilledseed | 19.0 |

### 11.2 By-Pass (BPS) Polypeptides

[0660] The results of the evaluation of transgenic rice plants expressing a nucleic acid encoding the BPS polypeptide of SEQ ID NO: 267 under non-stress conditions are presented below in Table C2.

[0661] When grown under non-stress conditions, an increase of more than 5% was observed for total seed yield, fill rate and harvest index.

TABLE C2
Results of the evaluation of transgenic rice plants expressing
a nucleic acid encoding the BPS polypeptide of SEQ ID NO: 268
under non-stress conditions - for each parameter, the percentage
overall is shown if it reaches p ≦ 0:05 and above the 5% threshold.

| Parameter | Overall increase |
|---|---|
| totalwgseeds | 11.2 |
| fillrate | 13.9 |
| harvestindex | 12.7 |

### 11.3 SIZ1 Polypeptides

[0662] The results of the evaluation of transgenic rice plants under non-stress conditions are presented below (Table D1). An increase of at least 5% was observed for total seed yield (totalwgseeds), number of filled seeds, fill rate, number of flowers per panicle (flowerperpan), harvest index, centre of gravity of the canopy (GravityYMax), proportion of the thick root in the root system (RootThickMax) and of thousand kernel weight (TKW).

TABLE D1
Evaluation of transgenic rice plants under non-stress conditions

| Parameter | Overall |
|---|---|
| totalwgseeds | 25.7 |
| nrfilledseed | 18.2 |
| fillrate | 18.0 |
| flowerperpan | 15.4 |
| harvestindex | 16.5 |
| TKW | 6.3 |
| GravityYMax | 5.0 |
| RootThickMax | 5.9 |

[0663] For each parameter, the percentage overall is shown if it reaches p<0:05 and above the 5% threshold.

11.4 bZIP-S Polypeptides

[0664] The results of the evaluation of transgenic rice plants in the T1 generation and comprising and expressing a nucleic acid comprising the longest Open Reading Frame in SEQ ID NO: 421 encoding the polypeptide of SEQ ID NO: 422 under non-stress conditions are presented below. See previous Examples for details on the generations of the transgenic plants.

[0665] The results of the evaluation of transgenic rice plants under non-stress conditions are presented below (Table D2). An increase of at least 5% was observed for the total seed yield (totalwgseeds), number of filled seeds (nrfilledseed), number of flowers per panicle (flowerperpan) and harvest index (harvestindex) in the transgenic compared to the control plants.

TABLE D2

| | % increase in transgenic |
|---|---|
| (Parameter) Yield Trait | compared to control plants |
| totalwgseeds | 14.2 |
| harvestindex | 9.9 |
| nrfilledseed | 13.2 |
| flowerperpan | 7.9 |

[0666] In a similar experiment, rice plants transformed with a Populus trichocarpa bZIP-like coding sequence (SEQ ID NO: 465) under control of the GOS2 promoter (SEQ ID NO: 629) were evaluated in a drought screen as described above. One of the six tested lines showed an increase in total weight of seeds, fillrate, harvest index, TKW, number of filled seeds. A second line had increased fill rate and harvest index and a third line showed increased TKW.

### 11.5 SPA15-Like Polypeptides

[0667] The results of the evaluation of transgenic rice plants in the T1 and T2 generations and expressing a nucleic acid encoding the SPA15-like polypeptide of SEQ ID NO: 634 under non-stress conditions are presented below in Table D3. When grown under non-stress conditions, an increase of at least 5% was observed for seed yield—fill rate, harvest index and thousand kernel weight (TKW).

[0668] In addition, plants expressing a SPA15-like nucleic acid showed higher total seed weight, number of filled seeds, flowers per panicle and the maximum gravity of the plants (Gravity YMax—height (in mm) of the gravity centre of the leafy biomass.

TABLE D3
Data summary for transgenic rice plants; for each parameter,
the overall percent increase is shown for T1 generation and the
confirmation (T2 generation), for each parameter the p-value
is <0.05.

Overall
increase

| Parameter | T1 | T2 |
|---|---|---|
| fillrate | 9.1 | 9.1 |
| harvestindex | 17.7 | 8.2 |
| TKW | 8.2 | 8.9 |

1-116. (canceled)

117. A method for enhancing yield-related traits in a plant relative to a control plant, comprising modulating expression in a plant of a nucleic acid encoding:
(a) an O-FUT polypeptide, wherein said O-FUT polypeptide comprises a domain with a PFam accession number PF10250;
(b) a BPS polypeptide;
(c) a SIZ1 polypeptide, wherein said SIZ1 polypeptide comprises a DUF206 domain;
(d) a bZIP-S polypeptide; or
(e) a SPA15-like polypeptide, wherein said SPA15-like polypeptide comprises an Armadillo-type fold domain with an InterPro accession number IPRO16024 and SuperFamily accession number SSF48371 and a “winged helix” DNA-binding domain with a SuperFamily accession number SSF46785.

118. The method of claim 117, wherein
(a) the O-FUT polypeptide comprises one or more of the following motifs:
(SEQ ID NO: 261)

| | |
|---|---|
| (i) | Motif 1: HYIALHLRYEKDM, |

(SEQ ID NO: 262)

| | |
|---|---|
| (ii) | Motif 2: IYIVAGEIYGGHSMD, |

(SEQ ID NO: 263)

| | |
|---|---|
| (iii) | Motif 3: ALDYNVAVQSDVFVYTYDGNMAKAVQGH; |

(b) the BPS polypeptide further comprises at least one of the following motifs:
(SEQ ID NO: 341)
(i) Motif 4:
SWM[KT][LQ]A[MI]ESLC[EA][TI]H[TN]DIKTLIT[DE]LELP,
(SEQ ID NO: 342)
(ii) Motif 5:
D[IL]C[IN]AFSSE[LI][ST]RLNQGHL[LY]L[QK]C[AV]LHNL
[DE][SG]SS,
(SEQ ID NO: 343)
(iii) Motif 6:
GKVLM[RQ]A[ML]YGV[KR]V[VQ]TV[FY][IV]CS[VI]FA[AV]
AFSGS,
(SEQ ID NO: 344)
(iv) Motif 7:
SWM[KT][LQ]A[MI]ESLC[EA][TI]H[NT]D[IV]KTLIT[DE]
LELPVSDW[DE][ED]KW[IV]DVYLD[IN]SVKL,
(SEQ ID NO: 345)
(v) Motif 8:
SL[ND]LPK[VI]KNSAKGKVLM[RQ]A[ML]YGV[KR]V[QV]TV[FY]
[IV]CSVFA[AV]AFSGS,
(SEQ ID NO: 346)
(vi) Motif 9:
PQ[ED]P[HP]R[PS]F[FL]PFGNPF,
(SEQ ID NO: 347)
(vii) Motif 10:
[VM]PK[EDN]K[SDN][DQ]ILT[LV]SWM[KS][QL]AM[EA]SLC
[EQ]TH[KN][NAS]I[KNR]TL[IV]TDL[EQ]LPVSD[WL]E[ED]
[KN][WF][VI][DY][IV]Y
(SEQ ID NO: 348)
(viii) Motif 11:
LPK[VK]KNSAKGKVL[ML]RA[LF]YGVKV[KQ]T[LV]YI[CS][SG]
VF[AT]AA[FW]S[GD]S[ST][NQK][ND]L[FL][YD][LV][TP]
[VI][SP][NE][EK]
(SEQ ID NO: 349)
(ix) Motif 12:
[PL]WA[KQP][SVA]F[MT][DE][MLV]Q[NS][TV][VM]N[AGPS]
EI[KR][ND][IM][FL][LS]S[DG][GR][LFS]T[VI][LIM]K
[ED]LE[AS]V[DE][AS][GS]V[KE][KQ]L[YA][PT][AM][IV]Q
[DQE]G[SV]
(c) the SIZ1 polypeptide comprises one or more of the following motifs:

| (SEQ ID NO: 409) | |
|---|---|
| (i) | Motif 13: MSCNGCRXLRKGCX, |
| (SEQ ID NO: 410) | |
| (ii) | Motif 14: QXXATXFXAKFXGR, |
| (SEQ ID NO: 411) | |
| (iii) | Motif 15: FXSLLXEAXG; |

(d) the bZIP-S polypeptide comprises one or more of the following motifs:
(i) Motif 19 as represented by SEQ ID NO: 522,
(ii) Motif 20 as represented by SEQ ID NO: 587,
(iii) Motif 21 as represented by SEQ ID NO: 600;
or
(e) the SPA15-like polypeptide comprises one or more of the following motifs:
(SEQ ID NO: 691)
(i) Motif 22:
AAD[KR]HWSDGALEADLR[RL]ADF[RV][AV][KR][QR]RAMEDA
[LF]MAL[EK]F[VI]K[ND][IV]HDMMV[SN][KR][ML][YQ]
[KE],
(SEQ ID NO: 692)
(ii) Motif 23:
RA[RC]QDVA[IV]LGS[GE]FLKLDARAR[EK]DTEKID[RHN],
(SEQ ID NO: 693)
(iii) Motif 24:
L[SA]EA[DC]GIDY[TN]D[PA]E[EF][LV],
(SEQ ID NO: 694)
(iv) Motif 25:
EADGIDYTDPEELELLV[AT]TLIDLDAMDGK[SG]S[VA]SLLAECSSS
PD VNTR[KQ]AL,
(SEQ ID NO: 695)
(v) Motif 26:
APSMW[TI]LGNAGMGALQRLA[EQ]DSN[PY]A[IV]A[AR]A,
(SEQ ID NO: 696)
(vi) Motif 27:
FPGEVS[TA]D[RQ]ITAI[QE]EAYW[SD]MA,
(SEQ ID NO: 697)
(vii) Motif 28:
DGIDYTDPEELELLV[AT]TLIDLDAMDGK[KSR]S[VA]SL[LI]AECS
SSPD VNTRKALAN,
(SEQ ID NO: 698)
(viii) Motif 29:
PSMW[TI]LGNAGMGALQRLA[QE]D[SP]N[YP]A[VI]A[RA]AA
[ST]RAI[ND][EA]L[KT]KQWE[LV]EEGDSLRF,
(SEQ ID NO: 699)
(ix) Motif 30:
[GL][SV][ST]S[PER][AT][NG][ST][TR][SDG][FR]I[TS]
LEKNG[NKI][TA][LF][EG][LF]FP[GH]EVS[TSA]D[QR]I
[TSY]AIE[EQ]AY[WKQ]SMASA[LF]SEA.

119. The method of claim 117, wherein the O-FUT polypeptide comprises a conserved Arginine residue in Motif 1.

120. The method of claim 117, wherein the modulated expression is effected by introducing and expressing in the plant a nucleic acid encoding:
(a) an O-FUT polypeptide;
(b) a BPS polypeptide;
(c) a SIZ1 polypeptide;
(d) a bZIP-S polypeptide; or
(e) a SPA15-like polypeptide.

121. The method of claim 117, wherein
(a) the nucleic acid encoding an O-FUT polypeptide encodes any one of the proteins listed in Table A1 or is a portion of such a nucleic acid, or a nucleic acid capable of hybridizing with such a nucleic acid;
(b) the nucleic acid encoding a BPS polypeptide encodes any one of the proteins listed in Table A2 or is a portion of such a nucleic acid, or a nucleic acid capable of hybridizing with such a nucleic acid;
(c) the nucleic acid encoding a SIZ1 polypeptide encodes any one of the proteins listed in Table A3 or is a portion of such a nucleic acid, or a nucleic acid capable of hybridizing with such a nucleic acid;
(d) the nucleic acid encoding a bZIP-S polypeptide encodes any one of the proteins listed in Table A4 or is a portion of such a nucleic acid, or a nucleic acid capable of hybridizing with such a nucleic acid; or
(e) the nucleic acid encoding a SPA15-like polypeptide encodes any one of the proteins listed in Table A5 or is a portion of such a nucleic acid, or a nucleic acid capable of hybridizing with such a nucleic acid.

122. The method of claim 117, wherein
(a) the nucleic acid encoding an O-FUT polypeptide encodes an orthologue or paralogue of any of the proteins given in Table A1;
(b) the nucleic acid encoding a BPS polypeptide encodes an orthologue or paralogue of any of the proteins given in Table A2;
(c) the nucleic acid encoding a SIZ1 polypeptide encodes an orthologue or paralogue of any of the proteins given in Table A3;
(d) the nucleic acid encoding a bZIP-S polypeptide encodes an orthologue or paralogue of any of the proteins given in Table A4; or
(e) the nucleic acid encoding a SPA15-like polypeptide encodes an orthologue or paralogue of any of the proteins given in Table A5.

123. The method of claim 117, wherein the enhanced yield-related traits comprise increased yield, preferably increased biomass and/or increased seed yield, relative to a control plant.

124. The method of claim 117, wherein the enhanced yield-related traits are obtained under non-stress conditions.

125. The method of claim 117, wherein the enhanced yield-related traits are obtained under conditions of drought stress, salt stress or nitrogen deficiency, or under conditions of a type of stress affecting the plant fertility.

126. The method of claim 117, wherein the nucleic acid is operably linked to a promoter active in roots or to a constitutive promoter, a GOS2 promoter, or a GOS2 promoter from rice.

127. The method of claim 117, wherein the nucleic acid is of any origin, of plant origin, from a monocotyledonous plant, or from a dicotyledonous plant.

128. A plant or part thereof, including seeds, obtained by the method of claim 117, wherein said plant or part thereof comprises:
(a) a recombinant nucleic acid encoding a O-FUT polypeptide;
(d) a recombinant nucleic acid encoding a BPS polypeptide;
(c) a recombinant nucleic acid encoding a SIZ1 polypeptide;
(d) a recombinant nucleic acid encoding a bZIP-S polypeptide; or
(e) a recombinant nucleic acid encoding a SPA15-like polypeptide.

129. A construct comprising:
(i) the nucleic acid encoding a polypeptide as defined in claim 117;
(ii) one or more control sequences capable of driving expression of the nucleic acid of (a); and optionally
(iii) a transcription termination sequence.

130. The construct of claim 129, wherein one of the control sequences is a promoter active in roots or a constitutive promoter, a GOS2 promoter, or a GOS2 promoter from rice.

131. A method for making a plant having increased yield, particularly increased biomass and/or increased seed yield relative to a control plant, comprising utilizing the construct of claim 129.

132. An isolated nucleic acid molecule selected from the group consisting of:
(i) a nucleic acid represented by SEQ ID NO: 1 or SEQ ID NO: 633;
(ii) the complement of a nucleic acid represented by SEQ ID NO: 1 or SEQ ID NO: 633;
(iii) a nucleic acid encoding the polypeptide as represented by SEQ ID NO: 2 or SEQ ID NO: 634, preferably as a result of the degeneracy of the genetic code, said isolated nucleic acid can be derived from a polypeptide sequence as represented by SEQ ID NO: 2 or SEQ ID NO: 634 and further preferably confers enhanced yield-related traits relative to control plants;
(iv) a nucleic acid having at least 30%, 31%, 32%, 33%, 34%, 35%, 36%, 37%, 38%, 39%, 40%, 41%, 42%, 43%, 44%, 45%, 46%, 47%, 48%, 49%, 50%, 51%, 52%, 53%, 54%, 55%, 56%, 57%, 58%, 59%, 60%, 61%, 62%, 63%, 64%, 65%, 66%, 67%, 68%, 69%, 70%, 71%, 72%, 73%, 74%, 75%, 76%, 77%, 78%, 79%, 80%, 81%, 82%, 83%, 84%, 85%, 86%, 87%, 88%, 89%, 90%, 91%, 92%, 93%, 94%, 95%, 96%, 97%, 98%, or 99% sequence identity with any of the nucleic acid sequences of table A1 or table A5 and further preferably conferring enhanced yield-related traits relative to control plants;
(v) a nucleic acid molecule which hybridizes with any of the nucleic acid molecules of (i) to (iv) under stringent hybridization conditions and preferably confers enhanced yield-related traits relative to control plants;
(vi) a nucleic acid encoding a O-FUT polypeptide having at least 50%, 51%, 52%, 53%, 54%, 55%, 56%, 57%, 58%, 59%, 60%, 61%, 62%, 63%, 64%, 65%, 66%, 67%, 68%, 69%, 70%, 71%, 72%, 73%, 74%, 75%, 76%, 77%, 78%, 79%, 80%, 81%, 82%, 83%, 84%, 85%, 86%, 87%, 88%, 89%, 90%, 91%, 92%, 93%, 94%, 95%, 96%, 97%, 98%, or 99% sequence identity to the amino acid sequence represented by SEQ ID NO: 2 and any of the other amino acid sequences in Table A1 and preferably conferring enhanced yield-related traits relative to control plants; and
(vii) a nucleic acid encoding a SPA15-like polypeptide having at least 50%, 51%, 52%, 53%, 54%, 55%, 56%, 57%, 58%, 59%, 60%, 61%, 62%, 63%, 64%, 65%, 66%, 67%, 68%, 69%, 70%, 71%, 72%, 73%, 74%, 75%, 76%, 77%, 78%, 79%, 80%, 81%, 82%, 83%, 84%, 85%, 86%, 87%, 88%, 89%, 90%, 91%, 92%, 93%, 94%, 95%, 96%, 97%, 98%, or 99% sequence identity to the amino acid sequence represented by SEQ ID NO: 634, and any of the other amino acid sequences in Table A5 and preferably conferring enhanced yield-related traits relative to control plants.

133. An isolated polypeptide selected from the group consisting of:
(i) an amino acid sequence represented by SEQ ID NO: 2 or SEQ ID NO: 634;
(ii) an amino acid sequence having at least 50%, 51%, 52%, 53%, 54%, 55%, 56%, 57%, 58%, 59%, 60%, 61%, 62%, 63%, 64%, 65%, 66%, 67%, 68%, 69%, 70%, 71%, 72%, 73%, 74%, 75%, 76%, 77%, 78%, 79%, 80%, 81%, 82%, 83%, 84%, 85%, 86%, 87%, 88%, 89%, 90%, 91%, 92%, 93%, 94%, 95%, 96%, 97%, 98%, or 99% sequence identity to the amino acid sequence represented by any one of SEQ ID NO: 2 or 22 and any of the other amino acid sequences in Table A1 and preferably conferring enhanced yield-related traits relative to control plants;
(iii) an amino acid sequence having at least 50%, 51%, 52%, 53%, 54%, 55%, 56%, 57%, 58%, 59%, 60%, 61%, 62%, 63%, 64%, 65%, 66%, 67%, 68%, 69%, 70%, 71%, 72%, 73%, 74%, 75%, 76%, 77%, 78%, 79%, 80%, 81%, 82%, 83%, 84%, 85%, 86%, 87%, 88%, 89%, 90%, 91%, 92%, 93%, 94%, 95%, 96%, 97%, 98%, or 99% sequence identity to the amino acid sequence represented by SEQ ID NO: 634, and any of the other amino acid sequences in Table A5 and preferably conferring enhanced yield-related traits relative to control plants; and
(iv) derivatives of any of the amino acid sequences given in (i), (ii) or (iii) above.

134. A plant, plant part or plant cell transformed with the construct of claim 129.

135. A method for the production of a transgenic plant having increased yield, particularly increased biomass and/or increased seed yield, relative to a control plant, comprising:
introducing and expressing in a plant the nucleic acid encoding a polypeptide as defined in claim 117; and
(ii) cultivating the plant cell under conditions promoting plant growth and development.

136. A transgenic plant having increased yield, particularly increased biomass and/or increased seed yield, relative to a control plant, resulting from modulated expression of the nucleic acid encoding a polypeptide as defined in claim 117, or a transgenic plant cell derived from said transgenic plant.

137. The plant of claim 128, or a plant cell or progeny derived from said plant, wherein said plant is a crop plant such as sugarbeet, or a monocot such as sugarcane, or a cereal, such as rice, maize, wheat, barley, millet, rye, triticale, sorghum emmer, spelt, secale, einkorn, teff, milo and oats.

138. Harvestable parts of the plant of claim 137, or the progeny thereof, wherein said harvestable parts are preferably shoot biomass and/or seeds.

139. Products derived from the plant of claim 137, or the progeny thereof, or from harvestable parts of said plant or said progeny.

The application's sequence listing, which the Patent Office published only in electronic form, follows.

SEQUENCE LISTING (702 sequences)

SEQ ID NO: 1 - DNA, 1008 bp, Oryza sativa
atggaccaatcactcaagtgggcatcaaagttatttagaaaaagacataatatactgcagtcgaagagttatgaactgctagttacttttctgcaggcttcttactacagagctttctcaaggacactgaagaaggccaaagttgtgaaattcacacatacagattcacgaattgttaacaatggtcttcccccatccatccaacgactccgttgtcgggcaaattatgaggcactaagattccacaaagaaattgaagagctgagtactgctctagtagatagactgaggaatggatccaatcattatatcgcacttcacttaaggtatgagaaggacatgctctcatttactggttgcagccacaacctaacacataaagaggcagatgagctgagagaaatgagactcaacgtgcggcactggaaagagaaggaaatcaacagtagggagaggagactccaaggacgctgccctatgactcctcgtgaagtagctcttttcctcaaagctatgggctatccttccagcacaaagatctatattgtagcaggtgaaatatatggtggacatagcatggattcattaaaggctgaatatccaaacatatatacacattatagtctggcaacggtagatgagttagagcctttcaagctataccaaaacagattagctgccttggactataatgtagccgtccaaagtgatgtttttgtgtatacgtatgatggaaatatggctaaagcagtacagggtcacagaagatttgaaggattccaaaaaaccatcaacccagacaggcagaagcttgtgggactcattgacaagcttgatgaaggtacactaacatggaatgagttccaaagtgaagtgaagatacatcatgaaaacagacttgggggtccatatcagaggttatctggtcgaagtcctaggcaagaggagtacttctacgcaaatccccttccaggctgcttgtgcaaaagaatgcaaaggattaaatga

SEQ ID NO: 2 - protein, 335 aa, Oryza sativa
MDQSLKWASKLFRKRHNILQSKSYELLVTFLQASYYRAFSRTLKKAKVVKFTHTDSRIVNNGLPPSIQRLRCRANYEALRFHKEIEELSTALVDRLRNGSNHYIALHLRYEKDMLSFTGCSHNLTHKEADELREMRLNVRHWKEKEINSRERRLQGRCPMTPREVALFLKAMGYPSSTKIYIVAGEIYGGHSMDSLKAEYPNIYTHYSLATVDELEPFKLYQNRLAALDYNVAVQSDVFVYTYDGNMAKAVQGHRRFEGFQKTINPDRQKLVGLIDKLDEGTLTWNEFQSEVKIHHENRLGGPYQRLSGRSPRQEEYFYANPLPGCLCKRMQRIK

SEQ ID NO: 3 - DNA, 1725 bp, Oryza sativa
atggctgcggcgccgccgtccgtggcgtcgtcgtcgtcgtcgtccagccccgtcctgtcggccgcgcaccgccgccggctcaacgacgtcgagcgagacgcgttcgactacggcggcccgtgcgacgtcgacgtcgatcatgatgacgacgacggcggcggcggagtgcgccgcgggcacggcgccggcgtggcgggtgtcagggcgctgttctcgtcggccaggaggagcaagagggcgtccgtgattatcgatcaggcatggctgcggaacgtggtcgcgtgcctgctcggcctcaccgtcgtcgccgggctcgtgctgagctcgcaccgagtgagcggcgccggcggcgggaggctcgtgcagaggatggacctcggtgacggcgaagtgatgggctggacggaggagaacttgacggctgttgctcgccagtcacctgacacgccgatgaagatatggatgacgccagatagtgaaggttatggcaaatgcattgaacgcccgaagaaacatgacagaatgaacagtgcaacagctggttatataattgttaatgccaatggtggattgaaccagatgagactgggaataagcgacatggttgcagttgctaagctcatgaatgcaacactagtaatccctactctggatcacaaatcattttggactgatccaagtgatttcaaagatatatttgatgtggaacacttcaagaaaactttagagggtgacatttcgattgtggattccttgccactagcttataaaggattgaaactttatatgagagcacccacttcttgggccaaggcttcttactacagagctttctcaaggacactgaagaaggccaaagttgtgaaattcacacatacagattcacgaattgttaacaatggtcttcccccatccatccaacgactccgttgtcgggcaaattatgaggcactaagattccacaaagaaattgaagagctgagtactgctctagtagatagactgaggaatggatccaatcattatatcgcacttcacttaaggtatgagaaggacatgctctcatttactggttgcagccacaacctaacacataaagaggcagatgagctgagagaaatgagactcaacgtgcggcactggaaagagaaggaaatcaacagtagggagaggagactccaaggacgctgccctatgactcctcgtgaagtagctcttttcctcaaagctatgggctatccttccagcacaaagatctatattgtagcaggtgaaatatatggtggacatagcatggattcattaaaggctgaatatccaaacatatatacacattatagtctggcaacggtagatgagttagagcctttcaagctataccaaaacagattagctgccttggactataatgtagccgtccaaagtgatgtttttgtgtatacgtatgatggaaatatggctaaagcagtacagggtcacagaagatttgaaggattccaaaaaaccatcaacccagacaggcagaagcttgtgggactcattgacaagcttgatgaaggtacactaacatggaatgagttccaaagtgaagtgaagatacatcatgaaaacagacttgggggtccatatcagaggttatctggtcgaagtcctaggcaagaggagtacttctacgcaaatccccttccaggctgcttgtgcaaaagaatgcaaaggattaaatga

SEQ ID NO: 4 - protein, 574 aa, Oryza sativa
MAAAPPSVASSSSSSSPVLSAAHRRRLNDVERDAFDYGGPCDVDVDHDDDDGGGGVRRGHGAGVAGVRALFSSARRSKRASVIIDQAWLRNVVACLLGLTVVAGLVLSSHRVSGAGGGRLVQRMDLGDGEVMGWTEENLTAVARQSPDTPMKIWMTPDSEGYGKCIERPKKHDRMNSATAGYIIVNANGGLNQMRLGISDMVAVAKLMNATLVIPTLDHKSFWTDPSDFKDIFDVEHFKKTLEGDISIVDSLPLAYKGLKLYMRAPTSWAKASYYRAFSRTLKKAKVVKFTHTDSRIVNNGLPPSIQRLRCRANYEALRFHKEIEELSTALVDRLRNGSNHYIALHLRYEKDMLSFTGCSHNLTHKEADELREMRLNVRHWKEKEINSRERRLQGRCPMTPREVALFLKAMGYPSSTKIYIVAGEIYGGHSMDSLKAEYPNIYTHYSLATVDELEPFKLYQNRLAALDYNVAVQSDVFVYTYDGNMAKAVQGHRRFEGFQKTINPDRQKLVGLIDKLDEGTLTWNEFQSEVKIHHENRLGGPYQRLSGRSPRQEEYFYANPLPGCLCKRMQRIK

SEQ ID NO: 5 - DNA, 1560 bp, Arabidopsis thaliana
atgcgaaggttaggtcaccaccgacttcatgggaagacgggaggagttggaacaaaggggatggtggcgaaactgtctatcggagtcattgttctactgatctgtacgctctcgctgcttttctcggctaacatcggtagcaatcgcgaaccgacccgtccatctaagataaacgtggaagagctctgggagagtgctaaatctggtggttggagaccgtcttctgcaccacgatctgactggcctcctcctacgaaggagacaaatggttatctccgtgttcgatgtaatggtggtttgaatcagcaacgtagtgcgatatgtaatgcagtacttgctgcgcggatcatgaatgctacacttgtgttgcccgaattagatgcaaactcgttttggcatgatgacagtggttttcaaggtatctatgacgttgaacattttattgagacactgaagtatgatgttaagattgtgggaaagatccccgatgttcacaaaaatgggaaaaccaagaagataaaagcttttcagattcgtcctcctcgagatgctcctattgagtggtacctgacaactgctctaaaggcaatgagggaacatagtgctatctatcttacccctttttcacatcgtttagcggaggaaattgacaatcctgaatatcaaaggttaaggtgcagagtgaactaccatgctttgagattcaagccacacatcatgaagttgagtgaatctattgttgataaactccggtcacagggccacttcatgtcgatccatcttcgttttgaaatggatatgttggcatttgcggggtgctttgacatatttaaccctgaggaacagaagatacttaggaagtaccgtaaagaaaattttgcagataaaaggcttatttacaacgaaagacgggctatcgggaagtgtccactgacccctgaggaggtaggtcttatattacgagcaatgagattcgacaactcaacaaggatatacctagcagccggtgaactttttggcggggaacagttcatgaaaccgtttcgaacattattcccacggcttgataaccatagctcggtagacccctctgaggagctgtcagcaacctcacagggattaataggatcagctgtggattacatggtttgtcttctctccgacatttttatgccaacatatgatggaccgagcaatttcgccaacaatctcttaggtcatcgcctttactatggtttccgtaccacaatcagaccagacagaaaagcattagctccaattttcatagctagagagaaggggaaaagggctggcttcgaagaggcagtgagacgagtaatgctgaaaacaaacttcggagggcctcacaagcgtgtatctcctgaatcgttttatacaaattcatggcctgaatgtttctgtcagatgaatccgaagaagtctagtgataaatgcccgccaaataatgttatagagattcttgacagccggttagagagtatcagagatccagattcaacttctcagacgaattccacggtcactggattagaacggtaa

SEQ ID NO: 6 - protein, 519 aa, Arabidopsis thaliana
MRRLGHHRLHGKTGGVGTKGMVAKLSIGVIVLLICTLSLLFSANIGSNREPTRPSKINVEELWESAKSGGWRPSSAPRSDWPPPTKETNGYLRVRCNGGLNQQRSAICNAVLAARIMNATLVLPELDANSFWHDDSGFQGIYDVEHFIETLKYDVKIVGKIPDVHKNGKTKKIKAFQIRPPRDAPIEWYLTTALKAMREHSAIYLTPFSHRLAEEIDNPEYQRLRCRVNYHALRFKPHIMKLSESIVDKLRSQGHFMSIHLRFEMDMLAFAGCFDIFNPEEQKILRKYRKENFADKRLIYNERRAIGKCPLTPEEVGLILRAMRFDNSTRIYLAAGELFGGEQFMKPFRTLFPRLDNHSSVDPSEELSATSQGLIGSAVDYMVCLLSDIFMPTYDGPSNFANNLLGHRLYYGFRTTIRPDRKALAPIFIAREKGKRAGFEEAVRRVMLKTNFGGPHKRVSPESFYTNSWPECFCQMNPKKSSDKCPPNNVIEILDSRLESIRDPDSTSQTNSTVTGLER

SEQ ID NO: 7 - DNA, 1773 bp, Arabidopsis thaliana
atgggacaagaaagacctaacgacgaagagagacccgagtcacgtgatcttggggtctacggatgttcaccgcctcattcgccgcgtctcggtccgaccaggttctacgtctttgctggagacccgaatccaaaacaaacgataaagcgatgcaagaggaagagaatccaagcttgtaacgatcaaagaacggctaaaacagctattggcgttatggcgattttgggtttcttttgcctcgttaattggttcatgctctctcgccttcacgaaggtcgggtctggcttcgaagaggactctctgagaacccaaaacatgtttctgcacagaatgaagagcgtaaaaagtttgaaaaacagaagatgaaatataatggaacatatggtagaatgttgagtttggctactgatgctttggcagagggaatgcgtgataaccgttattgtaatggttttgattttgagcagaacaaacttgagaccaaagacttatggcaggagccgaaggaacaagcttcggcgtggaagccttgtgcggatcaacgttctttgactcctgacgatggcaaaaatggatatattatggtaactgcaaacggagggattaatcagcaaagagttgctgtatgtaacattgttgttgtagctcgattgctcaatgcggctctcgtcattcccaaattcatgttaagtgacgtttggacagatgcaagtcagtttggagatatctaccaagaggaacattttatggagtacttgtcgcccgatattcggatagtaaaggagctaccaaaagagcttcaatctcttaatcttgaagaaatcggtagcgtcgtgacagatatagaagtgatgaaagaagccaaaccagacttttatatgacacacattctccctatactactcaagaacagagtaatccattttgtcggattcggaaaccgcttagcctttgatccattaccgtttgagttacagaggcttcggtgcagatgtaactttcatgcgctaaactttgtcccgaggatacaagaaactgcggcattgctcgtgaagagattacggggcagtggatcttactaccttgctctccatttacggtttgaaatcgacatggtggctcattctctatgttacttcggaggaggtgaaacagaacagaaagagttggattcttaccgccaaaaacactttccatctctttcaactttaaccagaaaaaaaaaattccgatctgcggatgttttgaggacagaaggactttgtccactaacacccgaagaagccgtgcttatgctcgcggctcttggcttcaaccgcgaaacccgagttttcgtagctggtgcaaacatatatggaggatcaaaacgtttagccgtgttaactagcttatacccgaatctagtcaccaaagaaaagttactaacagaatccgaactacaaccattcaaaaacttttcatctcagctagcggcattagatttcatcgcttgtgctgcagcagacgcttttgcgatgacggattcagggagtcagttatcatctcttgtatcgggttatcggatttattacggaggagggaaattgccgacgataagaccgaacaaacggagactttcggacatattgttgaagaacagtacgattgagtggaacgtgtttgagaaaagagtaagaaaagcgattagacagacgaaacatgtattcgctagacctaatggacgcagcgtttaccgttacccaagatgtaaagaatgtatgtgtcatgcatga

SEQ ID NO: 8 - protein, 590 aa, Arabidopsis thaliana
MGQERPNDEERPESRDLGVYGCSPPHSPRLGPTRFYVFAGDPNPKQTIKRCKRKRIQACNDQRTAKTAIGVMAILGFFCLVNWFMLSRLHEGRVWLRRGLSENPKHVSAQNEERKKFEKQKMKYNGTYGRMLSLATDALAEGMRDNRYCNGFDFEQNKLETKDLWQEPKEQASAWKPCADQRSLTPDDGKNGYIMVTANGGINQQRVAVCNIVVVARLLNAALVIPKFMLSDVWTDASQFGDIYQEEHFMEYLSPDIRIVKELPKELQSLNLEEIGSVVTDIEVMKEAKPDFYMTHILPILLKNRVIHFVGFGNRLAFDPLPFELQRLRCRCNFHALNFVPRIQETAALLVKRLRGSGSYYLALHLRFEIDMVAHSLCYFGGGETEQKELDSYRQKHFPSLSTLTRKKKFRSADVLRTEGLCPLTPEEAVLMLAALGFNRETRVFVAGANIYGGSKRLAVLTSLYPNLVTKEKLLTESELQPFKNFSSQLAALDFIACAAADAFAMTDSGSQLSSLVSGYRIYYGGGKLPTIRPNKRRLSDILLKNSTIEWNVFEKRVRKAIRQTKHVFARPNGRSVYRYPRCKECMCHA

SEQ ID NO: 9 - DNA, 1500 bp, Arabidopsis thaliana
atggaagttagatcggagagtaatattactcaggcgcgaagcgataagcttccgcttccgccggcagttccgaagcctcgtgtacaagtatggttcgttagagtttgctccagcattttggtttggacgtgtttggttcagcttttcgccgccggtgagctttggcattcccggatcttcactggtttaaccaatcagatttctagattctcagcccctgttgagccagttccattgccacctcctctacctcctccgaggaattatacaagcaatggtattctacttgtatcctgtaatggtggattgaatcaaatgcgatccgcgatatgtgatatggtgactgttgctcggttattgaatctcactctcgttgttccagagcttgacaaaacatctttctgggctgatcctagtggttttgaggatatttttgatgtgagacatttcattgattcattaagagatgaagttcggatcttaaggaggcttcctaaacggtttagtagaaagtatggatatcaaatgttcgaaatgcctcctgtgagctggtctgatgaaaaatattacttgaagcaggtattgcctctcttcagcaagcataaagttgtacacttcaataggactgatacccgcctggcaaacaatggtcttccgctctctctccagtggctcaggtgccgggtgaattttcagggactaaagttcactccacagcttgaggctttgggatctaagttagttcggattctacaacaaagagggccatttgtggctttgcatctgagatatgagatggacatgttagctttctctggctgcactcatggttgcactgaggaagaagcggaagagctaaaaaagatgaggtacacatatccctggtggagagagaaggagatagtctcagaggagaggagggcgcaagggctgtgtcctttgacgccagaggaggtggccttggtattaaaagcgttgggatttgagaaaaatacacagatatacattgcagctggtgagatttatgggagcgagcatagactatccgtgttaagggaagcattcccgagaattgtaaagaaggaaatgctattggagtcagcagagctgcaacagtttcagaaccattcgtctcaaatggctgctctagatttcatggtatctgtggccagcaacacttttattcctacgtatgatggaaacatggcaaaagtcgtggaaggtcatcgtagataccttggatataagaagacaatcctgcttgaccgtaagagactcgtggagctactagacttacatcacaacaagaccctcacgtgggatcagtttgcagtagcagtcaaggaagcccatgagagacgagcaggagcacctactcatcgaagagtaatctctgacaaacctaaggaggaagattacttctacgcaaatcctcaagaatgtctttgtgaaggtacaaattgccacgacctgtttggccatagaaatttaacacattga

SEQ ID NO: 10 - protein, 499 aa, Arabidopsis thaliana
MEVRSESNITQARSDKLPLPPAVPKPRVQVWFVRVCSSILVWTCLVQLFAAGELWHSRIFTGLTNQISRFSAPVEPVPLPPPLPPPRNYTSNGILLVSCNGGLNQMRSAICDMVTVARLLNLTLVVPELDKTSFWADPSGFEDIFDVRHFIDSLRDEVRILRRLPKRFSRKYGYQMFEMPPVSWSDEKYYLKQVLPLFSKHKVVHFNRTDTRLANNGLPLSLQWLRCRVNFQGLKFTPQLEALGSKLVRILQQRGPFVALHLRYEMDMLAFSGCTHGCTEEEAEELKKMRYTYPWWREKEIVSEERRAQGLCPLTPEEVALVLKALGFEKNTQIYIAAGEIYGSEHRLSVLREAFPRIVKKEMLLESAELQQFQNHSSQMAALDFMVSVASNTFIPTYDGNMAKVVEGHRRYLGYKKTILLDRKRLVELLDLHHNKTLTWDQFAVAVKEAHERRAGAPTHRRVISDKPKEEDYFYANPQECLCEGTNCHDLFGHRNLTH

SEQ ID NO: 11 - DNA, 1689 bp, Arabidopsis thaliana
atgatttcccaggtggagagagatctgtcgattcaaaatcggcttccgggaagcgatcacactactccttctccgccaacatctcctcatctctgccggagccggtcgaaatcctcctctgtctccgggcaacagcaaagtcggaacgtcgctcaccgtctctcatggatcattttatctgttcttctccggcgtcagggaattctccttttcgctcctatcatctacatctcctgtatgctttttcacctacacgcggcgtcgtttgatgcctctcccattatccaccgccgtcctgctccgggatccgtctaccggagccctcaggtttacgctaggcttcgcggcgagattgaagccgataataccacggctgatgcgatatcaacaatttggaagcgttcctataaaggtgtagaatggaagccatgtgtgaacatgtctactggagttttacctgtgtcaaatggtttcatatttattgaggcaaatggaggcttgaatcagcagcggacttcgatatgcaatgcggttgctgtggcaggctaccttaatgcgacccttgtaattcccaactttcactatcacagcatatggaaagatccgagtaaatttggggacatctatgatgaagagtactttatcgataccttagcaaatgatgtgcgggtggtcgatacagttcctgaatacttgatggagcgttttgactataacttgacaaatgtctacaacttcagagttaaagcatgggcacccacctcctattaccgggactcagtcctgccaaagctgcttgaagaaaaggttataagaatttccccatttgcaaatagactttcgtttgatgctcctcgagctgtccagagatttagatgtttggcgaataatgtagccttgcgattttcaaaacccatactgacccaaggagaaacattggtgaacaaaatgaagggtcttagtgcaaacaacgccgggaaatacgtttctgtgcatcttcgttttgaagaggatatggttgcgttctcttgttgtgtatttgatggtggagaccaagaaaaacaagacatgattgccgctagagaacgaggatggaaagggaagttcacaaaaccgggccgtgtgatacgaccaggagctaacaggctcaatgggaaatgccctttaactcctttagaggtcggtttgatgcttagaggaatgggcttcaacaaaagtacatatatattccttgccgctggcccgatatatagcgcaaatagaactatggccccactactcgagatgttccctaatctacagacaaaggagatgcttgcttctgaggaagacctggctccttttaagaacttctcctcgagaatggctgcaatagattacacggtgtgtctccacagtgaggtatttgtgacaacacaaggtggaaacttccctcatttcctcatggggcatcggaggtatttgtttggaggacattcaaagacgattcagccagacaagcgaaagttagccgtactctttgacaatcccaagttgggatggaaaagttttaaacggcaaatgctaagtatgaggtcccatagtgactccaaggggtttgagctgaaacgatcaagtgactccatttacatattcccttgtcctgattgtatgtgccggaagaacaaaacaacagcatcagccacctga

SEQ ID NO: 12 - protein, 562 aa, Arabidopsis thaliana
MISQVERDLSIQNRLPGSDHTTPSPPTSPHLCRSRSKSSSVSGQQQSRNVAHRLSWIILSVLLRRQGILLFAPIIYISCMLFHLHAASFDASPIIHRRPAPGSVYRSPQVYARLRGEIEADNTTADAISTIWKRSYKGVEWKPCVNMSTGVLPVSNGFIFIEANGGLNQQRTSICNAVAVAGYLNATLVIPNFHYHSIWKDPSKFGDIYDEEYFIDTLANDVRVVDTVPEYLMERFDYNLTNVYNFRVKAWAPTSYYRDSVLPKLLEEKVIRISPFANRLSFDAPRAVQRFRCLANNVALRFSKPILTQGETLVNKMKGLSANNAGKYVSVHLRFEEDMVAFSCCVFDGGDQEKQDMIAARERGWKGKFTKPGRVIRPGANRLNGKCPLTPLEVGLMLRGMGFNKSTYIFLAAGPIYSANRTMAPLLEMFPNLQTKEMLASEEDLAPFKNFSSRMAAIDYTVCLHSEVFVTTQGGNFPHFLMGHRRYLFGGHSKTIQPDKRKLAVLFDNPKLGWKSFKRQMLSMRSHSDSKGFELKRSSDSIYIFPCPDCMCRKNKTTASAT

SEQ ID NO: 13 - DNA, 1581 bp, Arabidopsis thaliana
atggcttttcaacggcggcgcaacaattactacaaccgtctccgtcgtcttcttcctttcatttgcgctgtctctggagctcttctcatcctcttcgctcttctctccattctttcccctcctcctgatgattccgatcgccgcatctccaagcatattaactatggagccaatgatgagaagaagaacacaccagtggttttcacagttccgagaggtggaggaagatcggatcgtgatatctggcgttcatggaatgctgaattcttttatggttgttgtaatgcaagcagcaagttcccaaatgctaaagcaattactagaaatgatcgatacttggcgattgccactagtggcggtttaaaccaacaacggactggtattgtagatgctgttgttgctgcaaggattctaaacgctacgcttgttattccgaagttggaccagaaatcctactggaaagatgccagtgacttctcgaacattttcgatgttgattggtttatgtcatttctctcaaaagatgtcaaaatcattgagaaacttccacagaaaggagggcaaacatggagccctcgcagaatgcgtgtaccgagaaaatgcaatgagaaatgctatatcaatcgggtgttacctgttcttcagaaaaggcatgcagttcaattgaataaatttgattacagactctcaaacaagttgagagatgatttgcagaagctgaggtttgaacctgatatgctcgccttctctggatgttactatggtggtggtgagaaggagaagaaagagttaggaacaatcagaaggagatggaaaactttgcatgtaaataaccctgaaaagcaaaggagacaaggaagatgtccacttacaccagaagaagttggattaatgcttagagctttgggatatggaagtgatgttcatatatatgttgcatcaggtgaagtttatggaggagaaaaatcattggctcctttgaaagcactttttccacatttctattcaaaagacaccatagctacaaaaatggagttaaaaccattttcttcttattcttcacgaatggctgcactcgatttccttgtgtgtgacgaaagcgatgttttcgttaccaacaataacggaaacatggcgagaatattagcaggtcgaaggagatactttggacataaaccaacaattagaccgaatgcgaaaaagctatacaagttgtttatgagcaaagagaatactacttgggaggagtttgcttcaagagtgagaacatttcagaaaggattcatgggagaaccaaaggaggtaagagccggaaaaggtgagtttcatgagaatccagcggcttgtatatgcgaagatactgatgctaaagtaaaagcgggaaagatggattcgagaaaattcgggaagaaagagcagaaagaagatgaagatgcagagttgtcgtcgtcagagacagattatgaggaagaccaaactgatttacaggacagaggcttgtataatggtacgaggttagattatgatgatgcgttatcggtttcagaagagcctgagctagaagaaatgctatcagattga

SEQ ID NO: 14 - protein, 526 aa, Arabidopsis thaliana
MAFQRRRNNYYNRLRRLLPFICAVSGALLILFALLSILSPPPDDSDRRISKHINYGANDEKKNTPVVFTVPRGGGRSDRDIWRSWNAEFFYGCCNASSKFPNAKAITRNDRYLAIATSGGLNQQRTGIVDAVVAARILNATLVIPKLDQKSYWKDASDFSNIFDVDWFMSFLSKDVKIIEKLPQKGGQTWSPRRMRVPRKCNEKCYINRVLPVLQKRHAVQLNKFDYRLSNKLRDDLQKLRFEPDMLAFSGCYYGGGEKEKKELGTIRRRWKTLHVNNPEKQRRQGRCPLTPEEVGLMLRALGYGSDVHIYVASGEVYGGEKSLAPLKALFPHFYSKDTIATKMELKPFSSYSSRMAALDFLVCDESDVFVTNNNGNMARILAGRRRYFGHKPTIRPNAKKLYKLFMSKENTTWEEFASRVRTFQKGFMGEPKEVRAGKGEFHENPAACICEDTDAKVKAGKMDSRKFGKKEQKEDEDAELSSSETDYEEDQTDLQDRGLYNGTRLDYDDALSVSEEPELEEMLSD

SEQ ID NO: 15 - DNA, 1698 bp, Arabidopsis thaliana
atgcggcggcggaggaagacggttgtggtggcggtagtgatacggagggtgctaatatgggccatatgcgtaatgacattactctgttttctcaccgtacacatctatgttgctcctttcaatagactccctaagcttcaccttaaccaccacaacactcgccgaggatatatcatagattacaataaatccatcacagaacagagtttaacgaggaatctgtctcgtccggaatctaatgaaattcctctcatctccaatcccaagacaaatgagattcagtatcaaagttcgatctcggaacacatcaacaacaccgagctagttcctcctcatgtgtctacaagcccttcttcttcttccaagttgaacattacaagcgggataccggatttcgacaagctttggaaacatccaccgaaccgaaatttcgtgccttgtgtcagtcccaatcctagttacacatctccattggaatctagaggctatcttcttgttcacacgaatggcgggcttaaccaaatgcgcgctgggatatgtgacatggtagctatagctcggattataaatgcaacacttgtagtccccgagctcgacaaacgatctttctggcaggatactagcaaattctcggatgtttttgatgaagatcacttcatcaatgctttatcaaaagatataagagtcatcaagaagctcccaaaaggcattgatggattaacaaaggtggttaagcatttcaaaagctactcaggattgagttactaccaaaatgagatagctagtatgtgggatgaatataaagtgatccgagccgcgaaatccgattctcgtctagcaaacaacaacctacctcctgatattcagaagctgcgatgtcgtgcttgttatgaggctctacgcttctctactaaaatcagatcaatgggagaacttttggtcgataggatgaggtcttatggtctatacatcgcattgcatttgaggttcgagaaagagatgctagcattcagcggctgcaaccatggtctatccgcttctgaagctgctgagctaaggaggataaggaagaacacagcgtattggaaagtgaaagacattgacggaagagtacaaagactcaaaggctattgtccattgactccaaaagaagttgggatattgctaacagctcttggatattcatcagacacaccggtatatatagctgctggtgagatttacggtggtgagtctcggttagccgatttacgctctcggttctccatgttaatgagtaaggaaaaattggcaacaagagaagagcttaagacttttatgaaccactcaactcaaatggctgcacttgactacattgtttccatcgaaagcgatgtttttattccgtcgtatagtggaaacatggcgagagctgttgaagggcatcgtcggtttcttggtcaccggaaaactatctctccggacaggaaagccattgtaaggttggtagacagaattggaagaggagctgagaaagataaccgaaaagtgtatgaaagaatcaatgagattcacaaaacccgacaaggatcaccgaggaggagaaaagggccagcttctggaacaaaaggtttggagagacatcgttctgaagaatccttctacgagaacccattaccagactgtctctgccagagagacccaagtaaagcgagataa

SEQ ID NO: 16 - protein, 565 aa, Arabidopsis thaliana
MRRRRKTVVVAVVIRRVLIWAICVMTLLCFLTVHIYVAPFNRLPKLHLNHHNTRRGYIIDYNKSITEQSLTRNLSRPESNEIPLISNPKTNEIQYQSSISEHINNTELVPPHVSTSPSSSSKLNITSGIPDFDKLWKHPPNRNFVPCVSPNPSYTSPLESRGYLLVHTNGGLNQMRAGICDMVAIARIINATLVVPELDKRSFWQDTSKFSDVFDEDHFINALSKDIRVIKKLPKGIDGLTKVVKHFKSYSGLSYYQNEIASMWDEYKVIRAAKSDSRLANNNLPPDIQKLRCRACYEALRFSTKIRSMGELLVDRMRSYGLYIALHLRFEKEMLAFSGCNHGLSASEAAELRRIRKNTAYWKVKDIDGRVQRLKGYCPLTPKEVGILLTALGYSSDTPVYIAAGEIYGGESRLADLRSRFSMLMSKEKLATREELKTFMNHSTQMAALDYIVSIESDVFIPSYSGNMARAVEGHRRFLGHRKTISPDRKAIVRLVDRIGRGAEKDNRKVYERINEIHKTRQGSPRRRKGPASGTKGLERHRSEESFYENPLPDCLCQRDPSKAR

SEQ ID NO: 17 - DNA, 1704 bp, Arabidopsis thaliana
atgctagcgaagaatcggctgccgggaagcggccacactactccgtctcctccggcatctcctcgccgttctcctcgttatcgtcacggtcggtctaaagccgccgccggtagtagatttcctacggttcaaccaagtcggaccctcgctcatcgcctctcgtggatcctcttatcggttcttctccgtcgtcaggggattttcttattcgctcctctaatctatatctcttgtatgctgctttacatgggaaccgtctccttcgacgttgttccaatcattcagcgtcgacctcctccaggatccgtttacaaaagccctcaggtttacgccaagctccgtcctgagatggacgccgataattccaccgctgatgccataacaaccatctggaaacattcctataaaggtggtgaatggaagccgtacgtgaacaagtctactggagacttgcctgagtcaaacggttacatatatgttgaggcaaatggaggcttgaatcagcagcggacatcgatatgcaatgcggttgctgtggcaggatatcttaatgcaactctagtaattcccaactttcactatcacagcatatggagagatccaagtaaatttggggacatctacgatgaagagttctttgtcagtaccttatcaaatgatgtgcgggtggttgatacaattcctgaatatctaatggagcgttttgaccataacatgacaaatgtctataacttcagagttaaagcatggtcacctattcaatattatcgagactcgatcttgccgaaacttcttgaggagaagattatacgaatatctccatttgcaaatagactttcttttgatgctcctcaagctgtccagagacttagatgtttggcgaattacgaagccctgaagttttcgaaaaccatactaaccctaggagaaacactggtgaagagaatgaaagagcaaagtgcaaaccacggtgcaaaatacgtgtctgtacatctgcgttttgaagaggacatggtagctttctcctgttgcatatttgatggtgggaaccaagaaaaacaagatatgattgcagcaagagaacgaggatggaaaggaaagttcacaaaaccaggccgtgttatacgacctggtgctatcaggcaaaacggaaaatgccctttaactcctttagaggtgggtttaatgcttagaggaatggggttcaacaaaagcacatatattttcctcgcgtctggtgaaatatatgatgcgaatcgaactatggccccgctactagagatgttcccaaatttacaaactaaggagatgcttgcatcagaggaggaacttgctccatataagaatttctcttccagaatggctgcaatagattacacggtctgtctccacagtgaggtatttgtgaccacgcaaggtggaaactttcctcatttcctcatgggtcatcggagatatatgtttggaggacattccaagaccattagaccagacaagcgaaagttagcaatcctctttgacaatccaaacatcggatggcggagttttaaacgtcagatgctaaacatgaggtctcatagtgactcaaaggggtttgagctaaaacgacctaatgactccatttacacattcccttgccctgactgcatgtcccgtaggaacaaaacaacaaccccagaatcgagaccacctcctgccacctga

SEQ ID NO: 18 - protein, 567 aa, Arabidopsis thaliana
MLAKNRLPGSGHTTPSPPASPRRSPRYRHGRSKAAAGSRFPTVQPSRTLAHRLSWILLSVLLRRQGIFLFAPLIYISCMLLYMGTVSFDVVPIIQRRPPPGSVYKSPQVYAKLRPEMDADNSTADAITTIWKHSYKGGEWKPYVNKSTGDLPESNGYIYVEANGGLNQQRTSICNAVAVAGYLNATLVIPNFHYHSIWRDPSKFGDIYDEEFFVSTLSNDVRVVDTIPEYLMERFDHNMTNVYNFRVKAWSPIQYYRDSILPKLLEEKIIRISPFANRLSFDAPQAVQRLRCLANYEALKFSKTILTLGETLVKRMKEQSANHGAKYVSVHLRFEEDMVAFSCCIFDGGNQEKQDMIAARERGWKGKFTKPGRVIRPGAIRQNGKCPLTPLEVGLMLRGMGFNKSTYIFLASGEIYDANRTMAPLLEMFPNLQTKEMLASEEELAPYKNFSSRMAAIDYTVCLHSEVFVTTQGGNFPHFLMGHRRYMFGGHSKTIRPDKRKLAILFDNPNIGWRSFKRQMLNMRSHSDSKGFELKRPNDSIYTFPCPDCMSRRNKTTTPESRPPPAT

SEQ ID NO: 19 - DNA, 1527 bp, Arabidopsis thaliana
atgagtgtcgtcgtcggagatagatcggagagtactctgatgcggagtgactataaagctcctccgagtcaagctattcccaaagctcgattacaagtttggttctttagagtttgttcttgcattttggtttggacttgtttgattcagctcttttggcattcccaaatcttcactggtttaaccaatcacatttctagattctctctcccggttcagtcagttccattacctcctcctcttcctccaaggaattacacaagtaatggaattttactagtgtcctgtaatggcggtttgaatcaaatgcgtgcagcgatttgtgatatggtgactgttgctaggctattgaatttgactcttgttgttcctgagcttgataaaaaatcattctgggctgatacaaggtatatgtttgtgtctcatgtcaatgatcctacaagatttgtttgtagtttaaagcattcttttgtttcttccttttacagtgactttgaggacatttttgatataaagcatttcattgattcgttaagagatgaagttaggatcataaggagacttcctaaacggtatagtaagaagtatggattcaaattgttcgaaatgccgcctgtgagctggtccaacgacaaatattacttgcaacaggtattgccgcggtttagtaaacgtaaagttatacatttcgttcggagtgatacgcgattggcgaacaatggtctttctcttgaccttcaaaggctgagatgccgagtgaatttccaaggactgagattcactccacggattgaggctttgggatcaaagttagttcggattcttcaacaaagagggtcttttgtggctttgcatttgagatatgagatggacatgttggctttctctggttgcactcatggttgtaccgatgaagaagctgaagaactcaaaaagatgaggtatgcatatccatggtggagagagaaagagatagtttcagaagaaaggagagtgcaaggactgtgtcctttgacaccggaggaggcggttttggttcttaaagcattggggtttcaaaaggatacacagatatacattgcagctggtgagatttttggtggtgcaaagagattagcccttctaaaggaatcatttccacgaattgtgaaaaaggaaatgctattagatccaacagaattgcaacagtttcagaaccattcatctcaaatggcagctctagatttcatagtatctgtagccagcaacacttttattcctacctattatggaaacatggcaaaagttgtcgaaggtcatcggaggtaccttgggtttaagaaaacaatcttgctagaccggaagagacttgtggagcttttagacttgcataacaacaaaacgctctcttgggatcagtttgcagtagctgtcaaggatgcccatcaaggacgacgaatgggagaaccaacacatcggaaagttatctccgttagaccgaaggaagaagattacttctatgccaatcctcaagaatgtatcagttaa

SEQ ID NO: 20 - protein, 508 aa, Arabidopsis thaliana
MSVVVGDRSESTLMRSDYKAPPSQAIPKARLQVWFFRVCSCILVWTCLIQLFWHSQIFTGLTNHISRFSLPVQSVPLPPPLPPRNYTSNGILLVSCNGGLNQMRAAICDMVTVARLLNLTLVVPELDKKSFWADTRYMFVSHVNDPTRFVCSLKHSFVSSFYSDFEDIFDIKHFIDSLRDEVRIIRRLPKRYSKKYGFKLFEMPPVSWSNDKYYLQQVLPRFSKRKVIHFVRSDTRLANNGLSLDLQRLRCRVNFQGLRFTPRIEALGSKLVRILQQRGSFVALHLRYEMDMLAFSGCTHGCTDEEAEELKKMRYAYPWWREKEIVSEERRVQGLCPLTPEEAVLVLKALGFQKDTQIYIAAGEIFGGAKRLALLKESFPRIVKKEMLLDPTELQQFQNHSSQMAALDFIVSVASNTFIPTYYGNMAKVVEGHRRYLGFKKTILLDRKRLVELLDLHNNKTLSWDQFAVAVKDAHQGRRMGEPTHRKVISVRPKEEDYFYANPQECIS

SEQ ID NO: 21 - DNA, 1917 bp, Arabidopsis thaliana
atgtcggcggccggtgcaagccctttggccgttgcaccaatcacagcccctaccaccaccacgcgtcgccgtgtcggagattctttagaaaccacctccgaacgaccttccatttcctccgattactgcaataccaacacagtcaacatcgccatatcacctgatatagacgacggagaaacaggtttgcaaggcggcgcgtgttcttcaccttcctcaattggttcctcctctagcggatctcattaccaccacgatcatcactaccatcatcatccaacgattcggtactttctgctccgtaaactacggttaccgtttctcttcgacggtgttggatcaacggctgtcgtaggtcaaggatggtggctctgttcagggagaaacgtgggtcgtcggatcttgggtcttctcatgatcttcgtcgtcgtttctctcttccttagagtctctctcatgagtgggcgcgtcgttgaccacgcgcaccggagagatttgaacgagcttgttgttatgcgggcgttacacgaagattggtcaatggctcaacgtgcaatgacggagaatgtcgtcattgagaagcttcccattccggaaatatggcagaaacctgaaagtggaaattatcgccagtgtgcgtcacgtcctaagaaccgttcaaggctgcgtaggaaaaccaacggttatcttttagtacacgcgaatggcggattgaatcagatgagaactgggatatgtgacatggttgctgcagcaaagattatgaatgcgactcttgttcttcctctactcgaccatgaatctttctggactgacccgagtactttcaaagatatttttgactggagacacttcatgaacgtattgaaagatgatgttgacattgtcgagtacttacctccccgatatgcagccatgagacctctcctcaaagctcctgtgtcttggtccaaggctagttactacagaagtgagatgttaccgctcttgaaaaaacataaggtgataaagttcacacacactgattcacgcctggccaacaatggcttgccaccatcaatccaaaggctgagatgtcgtgctaattaccaggcattagggtactccaaggagattgaggattttgggaaagttctggttaataggttacgaaacaacagtgaacctttcattgctttgcacttgagatacgagaaagacatgcttgcctttacaggctgcagccacaatctcacagctggggaagctgaagagctgagaataatgaggtacaatgttaaacattggaaggagaaagagattgacagcagagagagacggatccaaggcggttgcccgatgtctcctcgagaagcagccatatttcttaaggcaatgggatatccatcctcgacgactgtatacatagttgctggtgaaatatatggaggaaacagtatggatgcttttcgagaagagtacccaaacgtctttgctcattcatacttagcaactgaggaagagttagagccctttaagccataccagaaccggttagctgcgctggattacattgtggcacttgaaagcgatgtttttgtatatacatatgatgggaatatggctaaggcagtacaagggcaccgaagatttgaagggtttaagaaaactatcaatccagacaggctaaattttgtaagacttatagatcatttagacgaaggtgtcatgtcatgggatgagttttcatcagaggtgaagagattacataacaacaggattggagcgccatatgcgagactgcccggtgaattccctcggctagaagagaatttctacgcgaacccacaaccagattgcatatgtaacaagtctcagcctgagcaacttttgaaatcaagagagtcagatagatggaggaagagtgcttcaagatag

SEQ ID NO: 22 - protein, 638 aa, Arabidopsis thaliana [sequence omitted]

SEQ ID NO: 23 - DNA, 1722 bp, Arabidopsis thaliana
atggcgttatcgaaaaacagtaacagtaacagctttaacaagaagaaagtttcgtatatctcagtcccttctcagatcataaactctttatcatcttcctcattacaatctcttcttgtttctcccaagaaatcatcaagaagcaccaacagattcagcttctcttataggaaccctagaatctggttctttactctcttcctcgtctcactctttggaatgttgaaactcggtttcaacgttgacccaatctctctccctttctcacgttacccttgttcaacgacccaacaaccactaagcttcgacggagaacaaaacgctgcatcccatcttggtttggctcaagagccgattttgtctactgggtcatcgaattcgaatgcgattatacaattaaacggtggaaagaacgagactttgttaacggaaggtgatttctggaagcaacctgatgggttagggtttaagccctgtttgggatttacaagtcaatatagaaaagatagcaattcgattttgaagaacagatggaagtatttgcttgttgttgtctctggtgggatgaatcagcaaaggaatcagattgttgatgctgttgtgatcgctaggatccttggagcttctttagttgttcctgttttgcaggttaatgtcatttggggagacgaaagtgaatttgcggatatattcgatttggagcatttcaaggatgttttagcagatgatgttcatatagtttcgtctttaccttctacacatgttatgacgagacctgttgaagagaagaggactccacttcatgcttctcctcaatggattcgtgctcattatcttaagcgaattaacagagaaagagttttacttctccgtggactcgattcaagactctccaaagacctcccttcagatcttcagaaactccgatgcaaggttgctttccaagcgcttagattttctccgaggattcttgaactcggtaataaactagcttcaagaatgcgtaaccaaggacagtatctctcacttcatctaagaatggagaaagatgtttgggttagaactggttgtctccctggtttaactcccgagtacgatgaaatagtcaacagcgaaagagaacgacaccctgagcttcttaccggtagatcaaacatgacttatcacgagagaaaacttgccggtttatgccctttaactgctctagaagtcacaaggctgcttaaagcattagaagctccaaaggatgcgagaatctattgggcaggaggagagcctctaggaggaaaagaggttttggagccactaactaaagaattccctcagttctacaacaagcacgatcttgctttacctggcgagcttgaaccatttgccaacaaagcttcggttatggctgctatagactacattgtctgcgaaaagagcgatgttttcataccgtctcatggaggaaatatgggacacgcgttacaagggcaaagagcttacgctggtcacaagaaatacatcactcctaataagagacagatgcttccttatttcatgaactcgtcgcttcctgaatcggattttaacagaattgtgaaagatcttcatcgagaatcgctaggacagccggagttgagaatgagcaaagctggtaaagatgttacaaaacatcctgttccagagtgtatgtgctcggatagacaacaacaagaacaacagtccgatgcttaa

SEQ ID NO: 24 - protein, 573 aa, Arabidopsis thaliana
MALSKNSNSNSFNKKKVSYISVPSQIINSLSSSSLQSLLVSPKKSSRSTNRFSFSYRNPRIWFFTLFLVSLFGMLKLGFNVDPISLPFSRYPCSTTQQPLSFDGEQNAASHLGLAQEPILSTGSSNSNAIIQLNGGKNETLLTEGDFWKQPDGLGFKPCLGFTSQYRKDSNSILKNRWKYLLVVVSGGMNQQRNQIVDAVVIARILGASLVVPVLQVNVIWGDESEFADIFDLEHFKDVLADDVHIVSSLPSTHVMTRPVEEKRTPLHASPQWIRAHYLKRINRERVLLLRGLDSRLSKDLPSDLQKLRCKVAFQALRFSPRILELGNKLASRMRNQGQYLSLHLRMEKDVWVRTGCLPGLTPEYDEIVNSERERHPELLTGRSNMTYHERKLAGLCPLTALEVTRLLKALEAPKDARIYWAGGEPLGGKEVLEPLTKEFPQFYNKHDLALPGELEPFANKASVMAAIDYIVCEKSDVFIPSHGGNMGHALQGQRAYAGHKKYITPNKRQMLPYFMNSSLPESDFNRIVKDLHRESLGQPELRMSKAGKDVTKHPVPECMCSDRQQQEQQSDA

SEQ ID NO: 25 - DNA, 1539 bp, Arabidopsis thaliana
atgtgtaaagcggagaagtttctttatcacaggaaactctgggagatgaaggttaagtttctaggagatagtaagattgacaagcttaagaactccttggttttgaggtctcgtatgagcttatggatgattcgtgctatgactatattgttgctatggagttgctttgttcatttggttgctgtgggagagatgtggggacctagattgttgaaaggctggccttcttgtttcaatcaccatgacttccccattgctgcagaaatgacttctcttcccatgaaaatcgccctcccacctaaaaggatatatcagaacaatggctatcttatggtttcttgcaatggaggactcaaccaaatgcgagcagcgatatgtgatatggtcactattgcaagatacatgaatgtcacacttattgtcccagagcttgacaagacctcgttttggaatgatccaagtgagttcaaagacatattcgacgtggaccatttcataagttctttaagggacgaggttcgtatactaaaagagcttcctccaaggcttaagagaagggttaggctcgggctgtaccacaccatgcctcctattagctggtccaacatgtcctactaccaagaccagattcttccgctggtgaagaagtataaggtggtacatctgaacaagaccgatactcgacttgctaataacgaactacctgttgagattcagaagctgcgatgccgagcaaatttcaatgggcttaggtttactccaaagattgaggaattgggtagaagagtagtcaagattctcagggagaaaggtccctttctagttctgcatctcagatacgaaatggatatgttggcattttctggttgctcacatggttgcaaccgctacgaagaggaagaactaacaagaatgagatatgcttatccgtggtggaaagagaaagtaatagactccgagttgaagaggaaagaaggtctttgcccattgactcctgaagaaacagctcttacgctatctgcattgggtattgaccgaaatgttcagatttacatagctgcaggagaaatatacggtggtaaaaggcggttaaaggctttaacagatgtttttccaaatgtggtgaggaaagaaactctactcgattcttctgatttgagtttttgtaaaaaccattcttctcaaatggctgctcttgattaccttatctctctcgaaagtgatatattcgttcctacttattacggaaacatggcgaaagtcgtggaaggtcatcgcaggttcttggggttcaagaagacaattgagctaaaccggaagttgttggttaagctgatagatgaatattatgaaggattgttgagctgggaagtgttttcaaccacggttaaggcctttcacgctacacgaatgggagggccaaagagacggctagtgattccaaataaaccgaaagaagaagactacttctatgctaatccatatgaatgtcttcagctattacatgagaataatggcaattcactagaagaaacctaa

SEQ ID NO: 26 - protein, 512 aa, Arabidopsis thaliana
MCKAEKFLYHRKLWEMKVKFLGDSKIDKLKNSLVLRSRMSLWMIRAMTILLLWSCFVHLVAVGEMWGPRLLKGWPSCFNHHDFPIAAEMTSLPMKIALPPKRIYQNNGYLMVSCNGGLNQMRAAICDMVTIARYMNVTLIVPELDKTSFWNDPSEFKDIFDVDHFISSLRDEVRILKELPPRLKRRVRLGLYHTMPPISWSNMSYYQDQILPLVKKYKVVHLNKTDTRLANNELPVEIQKLRCRANFNGLRFTPKIEELGRRVVKILREKGPFLVLHLRYEMDMLAFSGCSHGCNRYEEEELTRMRYAYPWWKEKVIDSELKRKEGLCPLTPEETALTLSALGIDRNVQIYIAAGEIYGGKRRLKALTDVFPNVVRKETLLDSSDLSFCKNHSSQMAALDYLISLESDIFVPTYYGNMAKVVEGHRRFLGFKKTIELNRKLLVKLIDEYYEGLLSWEVFSTTVKAFHATRMGGPKRRLVIPNKPKEEDYFYANPYECLQLLHENNGNSLEET

SEQ ID NO: 27 - DNA, 1971 bp, Arabidopsis thaliana
atggtgtttaaatctagaataaaatggattgcgctatttgtgttgatcttatcaatgggatctctggttgttcatctttccatgacgaagtcttcaggtgtacagttggcgtattctgcaagagataacctttggcaggattttgattctttgttaggtgcacaggattttagaaataagcacttatggcggcctgtcaaatcgttagagaccttgcagccttatgccaatccaagaaatagttatcctgcgcccagttcgaaaaacaatggtttcatttatgcaaagatatttggtggatttgacaagattagatcttctatatgtgatcttgtcaccatatccaggcttctaaatgctactcttgtcattccagagcttcaagaaagtcttcgctcaaaaggcattagcaacaagttcaagagtttctcctatctttatgatgaagagcagtttatagcctttcttaaaaatgatgttatagttatgaagaccctccctgagagcttgaaagccgcaagaaaaaggaatgagttccctctttttaagcccaaaaactctgcgtcaccaaaattttacctcgaggatgtgttgccaaagttaaagaaagctaatgttattggattgatcgtctctgatgggggatgcttgcagtcagctttgcccgcttcaatgcctgaacttcaaagattaaggtgtagagttgccttccatgccctccagcttcgtccagaaattcaggtgctggccaaggagatggttgacaggttacgtaaatcaggtcaacctttcctagcttatcatcctggcttagtaagggagaaattggcatatcatggttgtgctgagcttttccaggatattcacagtgaactcatccaatatcggcgtgctcagatgatcaagcagaggtttattttagaagaacttattgtagactcgcgcttgcgcagggataatggcttatgtcctctcatgccagaagaggttggaattcttttgaaagcattgggttattctcaaaaagcgatcatatacttggctggttctgaaatatttggcggccaacgggttttgatccctctacgtgccatgttccctaatttagtggatcggacttctttatgcagcacggaggaattatcagaattggttggtcctgagacacctcttccagagaatacatataaaatgcctcctcgaaaaagcgataagcagctcaaggaagagtggaacaaggcaggtcctcgacctcgacctctacctcctcctccagacagacctatctaccagcacgaaaaagaaggatggtatggttggcttacagagaatgacacagaaccaagcccttcgcctatggatcttaggaatcaagcacacaggttactgtgggatgcccttgattttgctgtttctgtagaagctgatgtgttcttccctgggttcaacaacgatggtagtggatggccagatttttcaagtttggtgatgggtcaaaggctctatgaaagaccctcttcacgaacatatagactggacaggaaagttattcaagaacttttcaacattactcgtgaggacatgtaccatcccaaccgtaactggacacttcgtgtgaggaaacatcttaactcaagtttgggtgaaagtgggcttatcaggcagtctatgttgtcgaaacctaggtcgttcctttcgcatccacttcctgaatgctcatgcagaacctcagcccttgaggattccaggcaaatacagagtgatgatggtagatttctctatggaggtgaggatgaatgccctaaatggataaaatcagcgggagtggaaaagagtaaaactgatgatggtgatcagcctgattatgaccatgaccttctcgctgaacagtcagaaactgaagaagaatttgcaaaaagtaaggtagcttcagcttttgaccaagatgaagagtgggatcctaatgactag

SEQ ID NO: 28 - protein, 656 aa, Arabidopsis thaliana
MVFKSRIKWIALFVLILSMGSLVVHLSMTKSSGVQLAYSARDNLWQDFDSLLGAQDFRNKHLWRPVKSLETLQPYANPRNSYPAPSSKNNGFIYAKIFGGFDKIRSSICDLVTISRLLNATLVIPELQESLRSKGISNKFKSFSYLYDEEQFIAFLKNDVIVMKTLPESLKAARKRNEFPLFKPKNSASPKFYLEDVLPKLKKANVIGLIVSDGGCLQSALPASMPELQRLRCRVAFHALQLRPEIQVLAKEMVDRLRKSGQPFLAYHPGLVREKLAYHGCAELFQDIHSELIQYRRAQMIKQRFILEELIVDSRLRRDNGLCPLMPEEVGILLKALGYSQKAIIYLAGSEIFGGQRVLIPLRAMFPNLVDRTSLCSTEELSELVGPETPLPENTYKMPPRKSDKQLKEEWNKAGPRPRPLPPPPDRPIYQHEKEGWYGWLTENDTEPSPSPMDLRNQAHRLLWDALDFAVSVEADVFFPGFNNDGSGWPDFSSLVMGQRLYERPSSRTYRLDRKVIQELFNITREDMYHPNRNWTLRVRKHLNSSLGESGLIRQSMLSKPRSFLSHPLPECSCRTSALEDSRQIQSDDGRFLYGGEDECPKWIKSAGVEKSKTDDGDQPDYDHDLLAEQSETEEEFAKSKVASAFDQDEEWDPND

SEQ ID NO: 29 - DNA, 1740 bp, Arabidopsis thaliana
atgggaacatggaagaacaaaaacagtaataagaagaacagagttagctacatttcagtcccagctcagatcataaactcagtttcatcatcatctttacacaaatttctcgataataaatcttcaaagaagaacacaagcaagttcttcttcaatctcagaaacccaaagctctgggctttctctctcttcttactttctattttggggatatcattaagactcggtctttgtctttctcatttcggttctggcgatcacgaaagtcaacttcagagttcagattctaatggctcgcccaaatcccatatgggttttgcgtatatccgatcaagcactactcaagttgagatttcaaacgcaaaggatcgatctttagatatgggagtggagaaaaatgaaacctttggtggtcaccaatcacatttgatcatccctaatggaaatggacatgatgataagaattatgacttctggaaacagcctgatggattaggttacaagccttgcttagatttcagcattgaatacagaagagagagtaagaagattcttgtagagaggagaaagtatctgatggtggttgtctctggtgggttgaatcagcagaagattcagattgttgatgcagttgtgattgcgaggattctaggtgctgttcttgttgtcccaatattgcaaatcaatctcatttggggtgacgagagcgagttttcagatatatttgatttagagcaattcaagagtgttttagcaaatgatgtgaagattgtttcgttgcttcccgcaagtaaagtaatgactagaccatcggaagatggtagtatgccctttaatgcctcccctcaatggatccgttcgcactatccaaagcgtttcaatagggaaggtgttctgcttttaaggagattggattcaagattgtctaaagacttaccctctgatctccagaagctccgttgtaaggtagcatttgaagctctaaagttttcgccacgagttatggaaatggggacgaagcttgcagagaggatgaggagcaaagggccttacattgcgttgcatcttcggatggagaaagatgtgtgggtgagaacaggctgcctttctggtttgagctcaaagtatgatgagattgtgaacattgaaaggattaagcggcctgagctcttaacagccaaatctagtatgacatctaacgagagaaaactcgcgggtctctgtccgttaaatgccaaggaagtaacaaggctgcttagagctcttggagcaccaagagatgcgaggatctattgggcgggaggggaaccgctcggtggaaaggaagctttgaaaccgttaacaagtgaattcccacatctctacaacaagtacgatattgcgttgcctcttgaactcaaacctttcgcaaaacgagcttcgataatggcagcaatcgactatatagtgtgtaaggagagtgatgtgtttatggcatctcatggagggaacatgggccacgcaattcaggggcacagggcttatgaaggacacaagaagattataacgccaaacaaaagacatatgctaccatactttgtgaactcatcattgactgaaacagagtttgagaagatgataaagaaattacacagacaatctctaggacagccagaactaaggattagcaaagctggaagagatgttacaaagtaccctgttcctgagtgtatgtgcaatcaatccaacaccactatttag

SEQ ID NO: 30 - protein, 579 aa, Arabidopsis thaliana
MGTWKNKNSNKKNRVSYISVPAQIINSVSSSSLHKFLDNKSSKKNTSKFFFNLRNPKLWAFSLFLLSILGISLRLGLCLSHFGSGDHESQLQSSDSNGSPKSHMGFAYIRSSTTQVEISNAKDRSLDMGVEKNETFGGHQSHLIIPNGNGHDDKNYDFWKQPDGLGYKPCLDFSIEYRRESKKILVERRKYLMVVVSGGLNQQKIQIVDAVVIARILGAVLVVPILQINLIWGDESEFSDIFDLEQFKSVLANDVKIVSLLPASKVMTRPSEDGSMPFNASPQWIRSHYPKRFNREGVLLLRRLDSRLSKDLPSDLQKLRCKVAFEALKFSPRVMEMGTKLAERMRSKGPYIALHLRMEKDVWVRTGCLSGLSSKYDEIVNIERIKRPELLTAKSSMTSNERKLAGLCPLNAKEVTRLLRALGAPRDARIYWAGGEPLGGKEALKPLTSEFPHLYNKYDIALPLELKPFAKRASIMAAIDYIVCKESDVFMASHGGNMGHAIQGHRAYEGHKKIITPNKRHMLPYFVNSSLTETEFEKMIKKLHRQSLGQPELRISKAGRDVTKYPVPECMCNQSNTTI

SEQ ID NO: 31 - DNA, 1674 bp, Arabidopsis thaliana
atggcagagttacggcactcgagctctctcggtagccgatcttcttcttctccgttacgtgccgccggagatgaggattcttcatcgcctcatgtacacgatcactctcctaacggcggagacgacgaagatggtcgcccacgtcatccttctagagatcgagaccgtccgatctggtttcactctttgtttcctttcttcggtgatgatcctagggtttctcctcagaagaataaaatctcgcttctattgattttgattctcgctattgctagcttgatctcagtttatgggattattaatcacttgaatgctccttatttatgtaaaaaagatgggattgtgctaaactgtcctcatgtaaaagagtcaccttctccttgggagaatcctttatctgcaacaacttcttggaagccttgtgctgagcggcggattggtggaatctcagatcttcctcctgagaatgaaacaaatggctatgtattcattcatgctgaaggtggtttgaatcagcagcgaattgctatctgcaacgcagtagctgttgccaagattatgaatgcaacactgattctaccagtactgaagcaggaccaaatatggaaagacacaacaaaatttgaagacatttttgatgtagatcatttcattgattacttgaaggatgatgtccgaattgttcgagacatacctgactggttcactgacaaagcagagctattctctagtataagaagaacagtcaaaaacattcccaaatatgcagcagcccaattttatattgacaatgttttacctcggataaaggagaagaagataatggccttgaagccttttgtcgatcgacttgggtatgacaatgtacctcaagaaatcaacagattacgatgccgtgtaaattatcatgctctcaaatttcttccagagatagagcagatggctgattcacttgtttctagaatgagaaatcgcactggaaatccaaatccatatatggctcttcatcttagattcgagaaaggaatggttggtctatcgttctgtgattttgtggggacaagggaagagaaagttaaaatggcagaatacagacaaaaggaatggcctcggcgtttcaagaatggttcccatctctggcagctcgccttgcagaagcgcaaagaaggtcgatgccctcttgagccaggagaagttgctgtgatcctacgtgcaatgggctatccaaaagaaacacaaatctatgttgcatctggtcaagtctatggcggtcaaaaccgtatggctccactaagaaacatgttcccaaatttggtaacaaaggaggatttagcaggcaaagaggaactaacaacgtttagaaaacacgttacaagtcttgcggctctagatttcttggtgtgcttgaaatcagatgtatttgtgatgacacacggtggaaactttgcaaaactgatcatcggagcgcgtagatatatggggcatcgccagaaatcaatcaaaccggataaagggttgatgtcgaaatcatttggggatccttacatgggatgggcaacttttgtggaagatgtagttgtaacccatcaaacacgaaccggtttacctgaagaaactttccctaactatgatctttgggaaaatcctctcactccatgcatgtgtaaagcttga

SEQ ID NO: 32 - protein, 557 aa, Arabidopsis thaliana
MAELRHSSSLGSRSSSSPLRAAGDEDSSSPHVHDHSPNGGDDEDGRPRHPSRDRDRPIWFHSLFPFFGDDPRVSPQKNKISLLLILILAIASLISVYGIINHLNAPYLCKKDGIVLNCPHVKESPSPWENPLSATTSWKPCAERRIGGISDLPPENETNGYVFIHAEGGLNQQRIAICNAVAVAKIMNATLILPVLKQDQIWKDTTKFEDIFDVDHFIDYLKDDVRIVRDIPDWFTDKAELFSSIRRTVKNIPKYAAAQFYIDNVLPRIKEKKIMALKPFVDRLGYDNVPQEINRLRCRVNYHALKFLPEIEQMADSLVSRMRNRTGNPNPYMALHLRFEKGMVGLSFCDFVGTREEKVKMAEYRQKEWPRRFKNGSHLWQLALQKRKEGRCPLEPGEVAVILRAMGYPKETQIYVASGQVYGGQNRMAPLRNMFPNLVTKEDLAGKEELTTFRKHVTSLAALDFLVCLKSDVFVMTHGGNFAKLIIGARRYMGHRQKSIKPDKGLMSKSFGDPYMGWATFVEDVVVTHQTRTGLPEETFPNYDLWENPLTPCMCKA

SEQ ID NO: 33 - DNA, 2034 bp, Arabidopsis thaliana
atgaagggagaaggtaaagtcttcttgaagtcgcgtatgaaatggattggtcttcttggtcttgttctctctgctttctctcttcttgtccattttcttctcgctggattcacagatgactcaatctccgattactctatccctgtcactatcttctcttggagacctatcttcgacaatcccagatttgcccgtcatacaccattgtatagaagactttggggaccaacaagacatgtagagacattacttcctgatgctaatcctagaggttttcattcagatcctcctgcaaggacaaatggttttgtttttgttagaatacaaggtggtttccatgagattagaaactcgattcctgatgttgtagctgtgtctcggcttcttaacgccactttggtgattcctgagatacaatcaacaactagtagcaaagggattagttcacagttcaagagctttgcgtatttgtacaatgaagaacacttcatggctacaattgcaaatgatgttagagttgttaaaactcttcccaagaatctcaaatgggctagaagaaagaaacagattccttcttttaaagtctcttacggatcttcaccttattactacttacatcatgttctacctgttcttattaaacactcggtcgttgaactagttgtcccgcacggtggatgcttacaagctatacttcctagtgatcttgaagaatatcagaggttacggtgtagagttgctttccacggtttacaatttaggaaagaggttcaagaactttccactaaagtattacaaaggctgagaccgttaggacgacctttcatagcttatgatccagggatgacaagagaagctttggcctatcatggttgtgctgaactgttccaggatgttcataccgagctgattcaacataaacgagcttggatgataaaacgtggtattgtcaaagggaagctctctgtagactcagccgagcaacgcctcgcggggttatgtcctcttatgccagaagaagttggtattcttttacgagcttatggatactcatgggatacaatcatatatgtcgctgggggagaggtttttggtgggcagagaacgttaattcctttacatggtatgtttgagaatgtcgttgaccgtacttctctaagtactagctgggagcttgctaaaatgtatgggcgtgaggcaaagcataatgatatcaagaaaatgacacctccttcgatcgaggtagaaacgaaacatgattcattgaaaagcacaagacaaagacctcaaccgcttccacctccaccagctagaccaaagtactacaacatcgaaggttggtggggttgggtagccgagagtgacaacgagcccgaaagcacggttattgagttgagaactaatgcccataagttgttgtgggaagcgatagattacgttgttagcgtggaagcagatgtgtttatctcgggttttgatcgcgatgggaaaggacatccgagtttcgctagtttggtcatgggacaccggctttatcagtctgcttctgctaaaacatttagaccagacaggaaacaaattgcaatgcttttggaagagattcgagaccatatgtacgaggcgaatcacacttggataacatcagttaggaagctactaaagagaagcatactcgagggtctaatggaatcttccaaaagatcaaaagcatttagttttctttcccatcctgtacccgaatgttcttgcattacgcgaacccatccggtttcaaatgccacaaatcttggggtgacacaccgttgtccgcaatgggtggatggtgctgtaagcgaaagattaaaggagtataagaacgcagagaaagaagaggatcttgatgaagaggacttgtcttcttcaggattgttctttggtcacaaggaaagtggagggaataataatggtaacaatgagactgtaaattccgaagctaacaataaggaagaaggtcagcttgaagatcaagaagaacttgaaggcagcgaaagataa

SEQ ID NO: 34 - protein, 677 aa, Arabidopsis thaliana
MKGEGKVFLKSRMKWIGLLGLVLSAFSLLVHFLLAGFTDDSISDYSIPVTIFSWRPIFDNPRFARHTPLYRRLWGPTRHVETLLPDANPRGFHSDPPARTNGFVFVRIQGGFHEIRNSIPDVVAVSRLLNATLVIPEIQSTTSSKGISSQFKSFAYLYNEEHFMATIANDVRVVKTLPKNLKWARRKKQIPSFKVSYGSSPYYYLHHVLPVLIKHSVVELVVPHGGCLQAILPSDLEEYQRLRCRVAFHGLQFRKEVQELSTKVLQRLRPLGRPFIAYDPGMTREALAYHGCAELFQDVHTELIQHKRAWMIKRGIVKGKLSVDSAEQRLAGLCPLMPEEVGILLRAYGYSWDTIIYVAGGEVFGGQRTLIPLHGMFENVVDRTSLSTSWELAKMYGREAKHNDIKKMTPPSIEVETKHDSLKSTRQRPQPLPPPPARPKYYNIEGWWGWVAESDNEPESTVIELRTNAHKLLWEAIDYVVSVEADVFISGFDRDGKGHPSFASLVMGHRLYQSASAKTFRPDRKQIAMLLEEIRDHMYEANHTWITSVRKLLKRSILEGLMESSKRSKAFSFLSHPVPECSCITRTHPVSNATNLGVTHRCPQWVDGAVSERLKEYKNAEKEEDLDEEDLSSSGLFFGHKESGGNNNGNNETVNSEANNKEEGQLEDQEELEGSER

SEQ ID NO: 35 - DNA, 1917 bp, Arabidopsis thaliana
atgtcagtcgtcggagcgattaaccccgtaccaattgcacccaccactcgccgccgtgttggcgattctctagacgttatctccgaacgaccctcgaattcatctgattactgcaatacaattaaccaacccatcgttggatcaacagatttagacggaggagatgcgactggtcaagactcgtcaccatcttcggaaagctctgcttcatctactggatctcattaccatcacgatcactaccaccgattttacagtcatccggtgattcgttaccttctcctccgaaaattctggattccgttttatggtggtgcatcgacggttgtgattggtcaagggtttagatcggggagaaacgtgggtcgtcggatcttgggtcttctaatgttgcttgtggttgcgtctgtgttccttagagtctaccttatgggtggtgtccgcgtggtggatcacgctcgtttgaaggagtttgttgttgttagaacgcttcgtgatgattggtcaatggctcaacgtgaagttgcagagaaccaagcttcttctcagccaatgcgtgttctcgaaaagcttcccattccggaaatttggcagaaacctgaaagcgggaattatcgccaatgtgtgacgcgccctaagaactatacgagactgcaacgccaaaccaatgggtatcttgtagtacacgcaaatggaggattgaatcagatgagaactgggatatgtgacatggtcgctgttgccaagattatgaatgcaactcttgttcttcctctgcttgaccatgaatctttctggactgacccgagcacgttcaaagatatttttgactggagaaacttcatgaacgtactgaaacacgatgttgacattgtcgagtacttgcctcctcagtatgccgcaatgaaacctcttctcaaggcccctgtttcttggtctaaggctagttactacagaagcgaaatgttgccattgttgaaacgtcacaaggtgttaaagttcacgcttacggactcacggcttgctaacaatggcctgccaccatctatccaacgactgagatgtcgtgctaattaccaggcactgctatacacaaaggagattgaggacctagggaagattttggttaaccggttaagaaacaacactgagccgtatatcgctctgcatttgagatatgagaaggacatgcttgcctttacaggatgcaaccacaatcttacaactgaggaagcagaagagctgagaatcatgaggtacagtgtcaaacattggaaggagaaagagattgatagccgagagagacggattcaaggcggatgtccaatgtctccgcgagaagcagctatatttctaaaagccatgggatatccgtcctccacgactgtatatatagttgctggtgaaatctatggaagcgagagtatggatgctttccgtgcagagtacccaaatgtcttctctcattcaacccttgcgactgaagaagagttagagcctttcagtcaataccagaatcgccttgctgcgttggactacattgtggcccttgaaagtgatgtttttgtgtatacatatgatggtaatatggctaaggcggtacaagggcacagaaagtttgaagggtttaggaagtccataaatccagacaggctgaattttgttagactgatagatcattttgatgagggtatcatatcttgggaagagttttcttctgaggttaagagattaaatagagacaggattggagcagcatatgggagactgcctgctgcacttcccaggctagaggagaacttctatgcgaacccacaacctgattgcatctgtaacaagtctcatcctgagcagctgcggaaacaatcaagtctaaggacagactcaaagagttggaagaagagtgccttaagatag

SEQ ID NO: 36 - protein, 638 aa, Arabidopsis thaliana
MSVVGAINPVPIAPTTRRRVGDSLDVISERPSNSSDYCNTINQPIVGSTDLDGGDATGQDSSPSSESSASSTGSHYHHDHYHRFYSHPVIRYLLLRKFWIPFYGGASTVVIGQGFRSGRNVGRRILGLLMLLVVASVFLRVYLMGGVRVVDHARLKEFVVVRTLRDDWSMAQREVAENQASSQPMRVLEKLPIPEIWQKPESGNYRQCVTRPKNYTRLQRQTNGYLVVHANGGLNQMRTGICDMVAVAKIMNATLVLPLLDHESFWTDPSTFKDIFDWRNFMNVLKHDVDIVEYLPPQYAAMKPLLKAPVSWSKASYYRSEMLPLLKRHKVLKFTLTDSRLANNGLPPSIQRLRCRANYQALLYTKEIEDLGKILVNRLRNNTEPYIALHLRYEKDMLAFTGCNHNLTTEEAEELRIMRYSVKHWKEKEIDSRERRIQGGCPMSPREAAIFLKAMGYPSSTTVYIVAGEIYGSESMDAFRAEYPNVFSHSTLATEEELEPFSQYQNRLAALDYIVALESDVFVYTYDGNMAKAVQGHRKFEGFRKSINPDRLNFVRLIDHFDEGIISWEEFSSEVKRLNRDRIGAAYGRLPAALPRLEENFYANPQPDCICNKSHPEQLRKQSSLRTDSKSWKKSALR

SEQ ID NO: 37 - DNA, 1650 bp, Arabidopsis thaliana
atgggcgtagtagctgaggtttggaggtcgagcgtgaggctattaacgaactcgcctcagcttaacggtggctctcacaagagtgcgttatggaagtggcgatttttctctgctcagcccaaaagaaccgtaatgtggacatgggtttgtggtttcatgcttttctctttaggagtcatctcacttttcactggtcacgttgtctcgcaccttgagtggtattctcagcaattaagcaaacggagcttactggatatgagccgtcgagaaccaattgatgtatggaagtcaaaatattcgaagtttttctatggatgcagtgagagaggaaggaacttccttcctgctgtccaggagcagtcatctaatggatatttgcttattgcagctagtggaggccttaaccaacaaagaacaggaataactgatgcagtggttgttgcacggattcttaatgctactttagttgtacccgagttggatcaccattcttactggaaagatgacagtgacttcagtgacatttttgatgttaactggttcatatcttctctcgccaaagatgtgactatagtaaagagagttcccgacagagtcatgcgtgcgatggagaaacctccttataccacacgtgtgcctcgaaagtctactcttgagtattatcttgaccaagtattgccaattctcacgaggagacatgttttacaattgacaaagtttgactacagactagcaaatgatctagatgaagacatgcaaaagttgcgctgcagggtcaactatcatgctttaagattcacaaagcggatacaatcagttgggatgaaagtggtcaagaggatgagaaagatggccaaacgttttattgctgtccatttgagatttgagcctgacatgctagccttttctggttgtgactttggtgggggtgaaaaagagagagctgagctagcagaaataagaaaacgatgggacacattgcctgatctggaccctcttgaagaaagaaagcgtgggaaatgccctcttacacctcatgaagtgggcttaatgctgcgcgctcttggttttacaaacgacacatatatctatgtcgcatctggagaaatatatggtggtgaaaagacactgaaaccactgagagagctgtttccaaacttttacaccaaggaaatgcttgccaacgatgagctcaagcctctgcttccctattcttcacgccttgctgccattgactacattgttagtgacgaaagcgatgtgtttatcactaataataatggaaatatggccaagattcttgcaggccgaaggaggtacatgggtcacaagaggaccatcaggccaaatgcaaagaagctcagtgcattgttcatggaccgggaaaagatggagtggcaaactttcgccaaaaaagtgaaatcttgtcaacgtggattcatgggtgatccagatgagttcaaaccaggacgcggtgaattccacgagtacccgcaatcttgcatttgtcagagacccttctcttacgacaaaacctcaacggatgatgaagaagaagacatgtcagaagagaaccacaacagcaccagccctggacatgtacatttgtcttcagcagacaatgagcgcgacgaagttttccctgactag

SEQ ID NO: 38 - protein, 549 aa, Arabidopsis thaliana
MGVVAEVWRSSVRLLTNSPQLNGGSHKSALWKWRFFSAQPKRTVMWTWVCGFMLFSLGVISLFTGHVVSHLEWYSQQLSKRSLLDMSRREPIDVWKSKYSKFFYGCSERGRNFLPAVQEQSSNGYLLIAASGGLNQQRTGITDAVVVARILNATLVVPELDHHSYWKDDSDFSDIFDVNWFISSLAKDVTIVKRVPDRVMRAMEKPPYTTRVPRKSTLEYYLDQVLPILTRRHVLQLTKFDYRLANDLDEDMQKLRCRVNYHALRFTKRIQSVGMKVVKRMRKMAKRFIAVHLRFEPDMLAFSGCDFGGGEKERAELAEIRKRWDTLPDLDPLEERKRGKCPLTPHEVGLMLRALGFTNDTYIYVASGEIYGGEKTLKPLRELFPNFYTKEMLANDELKPLLPYSSRLAAIDYIVSDESDVFITNNNGNMAKILAGRRRYMGHKRTIRPNAKKLSALFMDREKMEWQTFAKKVKSCQRGFMGDPDEFKPGRGEFHEYPQSCICQRPFSYDKTSTDDEEEDMSEENHNSTSPGHVHLSSADNERDEVFPD

SEQ ID NO: 39 - DNA, 1560 bp, Arabidopsis thaliana
atgctccaaatgaagcagccattacagaaccttaatcagtcgcagaagacagctttagctggtgttttcgtgctccttttcccgattctctatccgaatctcttcagccctcttggtcgcgcctctccttctctcttctccgaatggaatgctccaaggcctagacatttgagcctactccaaggcgctcttgatcgacaaatttcgatcagacaacaagttgagttatggtctcccttggcagatcaaggttggaagccttgcactgaatcttatagaggcgcttccttgccagagaagtctgaagggtttcttcaggttttccttgacggcggactaaatcaacaaagaatgggaatatgtgatgctgttgctgttgccaagataatgaacgttacactcgtgattccacgccttgaagtaaatactgtttggcaagattcaagttctttcacagatatatttgatttggatcactttataagtgtccttaaagacgaggtgcggattgttagggagcttccaatacagtatgcctggagcactcgtgattattacgctacaggtattcgagctactaggattaagactgcgcctgttcacgcttcagcagagtggtatttggaaaatgtcttacctattatccagagttatggcattgctgctgttgctccattctctcaccgtttggcatttgacaatttgcctgaaagtatacagcggttacgctgtaaagtaaattttgaagcattaaactttgttcctcatattcgtgagctaggggacgctcttgtgcatcgactcagaaatcctccttccagctctcaaacatcaggaactatggatccgacagacagaataaacaccattgtaaaagctggtgctggaaagtttgcagtgcttcatcttcgtttcgataaagacatggctgctcattcaggctgtgactttgaaggtggcaaagcagaaaaactggcgctggcaaaatatcgccaggtgatctggcaaggaagggtcttaaattcacagttcacagatgaggagctaagaaacaaaggtcgctgcccgttgacaccagaagagattggtttactgctgtcagctttgggtttcagtaacaatacccgtctctatctagcgtcacaccaggtttacggaggagaagcaagaatctcaacgctgcgtaaactgttccccgggattgaaaacaagaaaagcctagcctctgctgaggaactagctgatgtacaagggaaagcttctctgatggctgcagtcgattactacgtgagtatgaagagcgacatcttcatctctgcatctcccgggaacatgcacaacgcattacaggcgcatagagcctacttgaatctcaaaaccataagacccaacatgatactgttaggacaagtctttgtgaacaagagcttagattggtcagagtttgaaggagcagtaatgaatgggcacaaaaacaggcaaggccagcttcgtctacgcaaacagaaacagtctatttacacttatccagctcctgattgcatgtgtaaagtagcttag

SEQ ID NO: 40 - protein, 519 aa, Arabidopsis thaliana
MLQMKQPLQNLNQSQKTALAGVFVLLFPILYPNLFSPLGRASPSLFSEWNAPRPRHLSLLQGALDRQISIRQQVELWSPLADQGWKPCTESYRGASLPEKSEGFLQVFLDGGLNQQRMGICDAVAVAKIMNVTLVIPRLEVNTVWQDSSSFTDIFDLDHFISVLKDEVRIVRELPIQYAWSTRDYYATGIRATRIKTAPVHASAEWYLENVLPIIQSYGIAAVAPFSHRLAFDNLPESIQRLRCKVNFEALNFVPHIRELGDALVHRLRNPPSSSQTSGTMDPTDRINTIVKAGAGKFAVLHLRFDKDMAAHSGCDFEGGKAEKLALAKYRQVIWQGRVLNSQFTDEELRNKGRCPLTPEEIGLLLSALGFSNNTRLYLASHQVYGGEARISTLRKLFPGIENKKSLASAEELADVQGKASLMAAVDYYVSMKSDIFISASPGNMHNALQAHRAYLNLKTIRPNMILLGQVFVNKSLDWSEFEGAVMNGHKNRQGQLRLRKQKQSIYTYPAPDCMCKVA

SEQ ID NO: 41 - DNA, 1656 bp, Arabidopsis thaliana
atggcctctttgaagttgaagaaaagggataatggcgctgaacccgacaagaaaaagctggtcatcgccggtattcgccaccagttactccttctccttcgccgccgtcaccgtctatttccgctggtatctgccgtctccggctgtctcctcctcatcctcttctcattctccaccctctctcctcctccattgatccatcataacaatcaagtggccgtcgaacccaatccaaccactccatttcgtgtacccgaaaatggcggaaggtcggatcgccagttatggagctcgagattgtccaacttgtactatgcctgcagtaatgcaactgacacctttcaagttacggatacgagaagccaaaccaatcggtatttactgatcgcaacaagcggagggttaaaccaacagcggacagggataatagatgctgtagtagcggcatacattctaaacgccactcttgtggtccctaaacttgaccagaagtcgtactggaaggacaccagcaactttgaggatatatttgatgttgattggttcatatcgcatctctccaaagacgtgaagatcatcaaggagcttcctaaagaagagcagtcaagaatatccaccagcctacagtcaatgcgtgtcccaaggaagtgcacgccttcttgctacttgcagcgtgttttgcccattcttactaagaaacatgttgtacaactctccaaattcgattacaggctgtccaacgctcttgatacagagctccagaaactgcgttgtagagtcaactaccatgccgtcaggtatacagagtctatcaacaggatgggccaattgttggttgaccggatgagaaaaaaggccaaacattttgttgcccttcatctcagattcgaacctgatatgctggccttctccggatgctattacggcggtggtcaaaaggagagactcgaactcggagctatgagaagaaggtggaaaacgttacatgcggcaaaccctgaaaaggtacggcggcacgggagatgtcccctgacgccagaggagattggtctgatgctcagaggcttaggttttgggaaagaggttcacttgtacgttgcatcaggcgaggtatacggaggggaggatacattggcacctttaagagctctgtttccgaatcttcatacaaaagagacactgacctccaagaaagaactggctccgtttgcaaacttctcatcacgcatggctgctcttgacttcattgtctgtgataagagcgacgcatttgtcacaaacaacaacggcaacatggctcgaatcttagctgggagaaggagatacttgggacacaaagtaaccatccgtccaaacgccaagaaactctacgaaatcttcaaaaatagacacaacatgacatggggtgagttctcatcgaaggtcagaagataccagacgggtttcatgggggagccagatgaaatgaaaccaggagagggggagttccatgagaacccagcctcctgcatttgtcgaacctctgaagcaagagtcaaagaaaaagcaaaacatgtaaatgaagatgactcatcggagtactcagagattggtaatgtccccatatccagtagaagcgatttggatcactcacaatttgatgaagtgatcttctga

SEQ ID NO: 42 - protein, 551 aa, Arabidopsis thaliana
MASLKLKKRDNGAEPDKKKLVIAGIRHQLLLLLRRRHRLFPLVSAVSGCLLLILFSFSTLSPPPLIHHNNQVAVEPNPTTPFRVPENGGRSDRQLWSSRLSNLYYACSNATDTFQVTDTRSQTNRYLLIATSGGLNQQRTGIIDAVVAAYILNATLVVPKLDQKSYWKDTSNFEDIFDVDWFISHLSKDVKIIKELPKEEQSRISTSLQSMRVPRKCTPSCYLQRVLPILTKKHVVQLSKFDYRLSNALDTELQKLRCRVNYHAVRYTESINRMGQLLVDRMRKKAKHFVALHLRFEPDMLAFSGCYYGGGQKERLELGAMRRRWKTLHAANPEKVRRHGRCPLTPEEIGLMLRGLGFGKEVHLYVASGEVYGGEDTLAPLRALFPNLHTKETLTSKKELAPFANFSSRMAALDFIVCDKSDAFVTNNNGNMARILAGRRRYLGHKVTIRPNAKKLYEIFKNRHNMTWGEFSSKVRRYQTGFMGEPDEMKPGEGEFHENPASCICRTSEARVKEKAKHVNEDDSSEYSEIGNVPISSRSDLDHSQFDEVIF

SEQ ID NO: 43 - DNA, 1896 bp, Arabidopsis thaliana
atgtcagtcggcgttccagtgaatccgtcaagcagcagccaactaccggcggcgccaacaacaacaacaagacggcgcgtggctgattctcaagaagatcattcccacgtcaacaccgtcggaggaggaaacgcagtcgtttacgtccccgacgaggaagaaaccgctacgagctgctgcggcggaggaggaggaggaggatcattatcgtgttgtccaagtggctcccaccacaattacctcgtcgggttcctctctctccgaaaattcaggctcgtgtggatgctaatggttgagaacaaatctaaatggacggctgggattgctcgtaacatgagatccacgaccaatcttggccgttttattctaacgttattgagtatcctcgtcgtcacttttttcctcatcgttgctctctccggcggcgttggaagacggagaaaacacgttgagaaacatgaattcgttgtttcaattcatcccagaccaacgattgagaaaatcattagagaagatgaatcatccaattcctttcaagtcctcgttccaaaaactacatcgatcccagagatttggaatcaaccggaggttgggaactatcagaaatgtgtagctcgtcctaagaaccaaagaccaatcaagcaaaccaatggttaccttcttgttcacgccaatggtggtttgaatcagatgagaactggtatatgtgatatggtggcaatcgctaaaatcatgaacgcaactcttgttcttccgtttcttgaccattcatctttctggagtgatccaagctcgttcaaggacattttcgactggaaacatttcataaaagtactagcagaagatgtcaatattgtcgagtatttaccgcaagaatttgcttcgattaagcctcttgaaaagaatcctgtgtcctggtctaagtcgagttattacagaaactcaatctccaagttacttaagaagcataaggtgattgtattcaatcacactgattctcggctagccaacaacagtccgcctccttccatccagcggcttcgatgtcgcgcaaactatgaagctcttcgttactctgaagatatagagaatctgagcaatgttctctcttcaagacttagggaaaacaacgaaccctacctcgctcttcacttgcggtacgagaaagatatgttggcgtttaccggatgcaatcacagtctatccaatgaagaatccattgatcttgagaagatgaggtttagtattccacactggaaagaaaaagtgatcaatggtacagaacggcgtcttgaaggtaattgccctatgacgccgcgtgaagctgccgtcttcctcaaggcgatggggtttccttcgaccaccaatatctacattgttgcaggaaaaatctacgggcaaaacagtatgactgcgttccacgaagagttcccaaacgttttctttcacaacacattggccacagaggaagagctttcgactattaaaccttatcagaacagattagctgctcttgattacaatttagcactcgaaagcgatattttcgcttatacttatgatggaaacatggcgaaagcggttcaaggtcaccggagattcgaagggtttagaaaaacgattaatcccgataggcaaagattcgtgagattgattgatcggctcgatgcaggactcatatcttgggaagatttctcgtcaaaggttaagaagatgcatcagcatagaataggagcaccgtatcttaggcagccaggaaaggcaggcatgagtccaaagttagaggagaatttttatgctaaccctcttcctggttgcgtgtgcgatacgtctgaggaacaaaccggccttaaccggtttgaaagaccaagtctacgagcacaatctctgagataa

SEQ ID NO: 44 - protein, 631 aa, Arabidopsis thaliana
MSVGVPVNPSSSSQLPAAPTTTTRRRVADSQEDHSHVNTVGGGNAVVYVPDEEETATSCCGGGGGGGSLSCCPSGSHHNYLVGFLSLRKFRLVWMLMVENKSKWTAGIARNMRSTTNLGRFILTLLSILVVTFFLIVALSGGVGRRRKHVEKHEFVVSIHPRPTIEKIIREDESSNSFQVLVPKTTSIPEIWNQPEVGNYQKCVARPKNQRPIKQTNGYLLVHANGGLNQMRTGICDMVAIAKIMNATLVLPFLDHSSFWSDPSSFKDIFDWKHFIKVLAEDVNIVEYLPQEFASIKPLEKNPVSWSKSSYYRNSISKLLKKHKVIVFNHTDSRLANNSPPPSIQRLRCRANYEALRYSEDIENLSNVLSSRLRENNEPYLALHLRYEKDMLAFTGCNHSLSNEESIDLEKMRFSIPHWKEKVINGTERRLEGNCPMTPREAAVFLKAMGFPSTTNIYIVAGKIYGQNSMTAFHEEFPNVFFHNTLATEEELSTIKPYQNRLAALDYNLALESDIFAYTYDGNMAKAVQGHRRFEGFRKTINPDRQRFVRLIDRLDAGLISWEDFSSKVKKMHQHRIGAPYLRQPGKAGMSPKLEENFYANPLPGCVCDTSEEQTGLNRFERPSLRAQSLR

SEQ ID NO: 45 - DNA, 1527 bp, Arabidopsis thaliana
atgtgtaaaatggagaagtttctttaccacaggaaactatgggagatgaatgttaagcttttaggagagagcaaagttgagaaactcaagaactcttttgtttcgaggcctcgtatgagcttatggatgattcgtgctgttactgtattgttgctttggagctgttttgttcatttgatggctttgggagagatgtggggaccaagattgtttaaaggttggccttcttgtttcaatcaccatcaactgtccactgccgcagagatgacgtctcttcctaccaaaattgctcttccacctaaaagggtatatgtgaacaatggttatcttatggtttcctgcaatggaggactcaatcaaatgcgagcagctatatgtgatatggtaaccgttgcaagatacatgaatgttacacttattgtgccggagcttgacaagacctctttttggaacgatccaagtgagtttaaagacatattcgatgtggatcacttcataagttcgttaagagatgaagttcggatactcaaagagttacctccaaggcttaagaaaagggttgagcttggagtgtaccacgaaatgcctcctattagttggtcaaacatgtcttactaccaaaatcagattcttccactggtgaaaaaacataaggttttacatctgaacagaacggatacccgacttgctaataatggactgcctgtggaggttcagaagctgaggtgccgagtaaatttcaatgggcttaagtttactcctcagattgaggaattaggtagacgagtagtcaagattctgagagagaaaggtccctttcttgtcctgcatctcagatatgagatggatatgttagcattttctggttgttcacatggttgcaaccccgaggaagaagaagaactaacaagaatgagatatgcttatccatggtggaaagagaaagtcataaactctgagctgaagaggaaagatggcctttgccctttaactcctgaggaaaccgctctcactctgaccgcgttgggtattgaccgaaatgttcaaatttacatagctgctggagaaatctatggtggtcaaaggcggatgaaggctttaacagacgcttttccaaatgtggtccggaaagaaaccctactcgaatcctctgatctggatttttgccggaaccattcatctcaaatggctgcacttgattacctagtggcacttgagagcgacatatttgttccaaccaatgatgggaacatggcaagagttgttgaaggtcatcgcagattcttggggttcaagaagacaatccagctgaataggaggttcctagttaagctgatagatgagtatactgaaggattgttgagttgggatgtattttcatccacggtgaaggcatttcactctactcgaatgggaagccctaagagacggttagtgattcccaatagacccaaggaagaagactacttctacgccaacccacaagaatgtctgcagctgttagatgaaccattgagagtcatttga

SEQ ID NO: 46 - protein, 508 aa, Arabidopsis thaliana
MCKMEKFLYHRKLWEMNVKLLGESKVEKLKNSFVSRPRMSLWMIRAVTVLLLWSCFVHLMALGEMWGPRLFKGWPSCFNHHQLSTAAEMTSLPTKIALPPKRVYVNNGYLMVSCNGGLNQMRAAICDMVTVARYMNVTLIVPELDKTSFWNDPSEFKDIFDVDHFISSLRDEVRILKELPPRLKKRVELGVYHEMPPISWSNMSYYQNQILPLVKKHKVLHLNRTDTRLANNGLPVEVQKLRCRVNFNGLKFTPQIEELGRRVVKILREKGPFLVLHLRYEMDMLAFSGCSHGCNPEEEEELTRMRYAYPWWKEKVINSELKRKDGLCPLTPEETALTLTALGIDRNVQIYIAAGEIYGGQRRMKALTDAFPNVVRKETLLESSDLDFCRNHSSQMAALDYLVALESDIFVPTNDGNMARVVEGHRRFLGFKKTIQLNRRFLVKLIDEYTEGLLSWDVFSSTVKAFHSTRMGSPKRRLVIPNRPKEEDYFYANPQECLQLLDEPLRVI

SEQ ID NO: 47 - DNA, 1959 bp, Arabidopsis thaliana
atgggccaccaccacgacggtggcgatggcgtacctcaacatcacgtcaacagtcctcgattttccggtccaatgactcgtcgtgctcaatcattcaaacgcggcggttccgctggtagtagtagcaataataataatactcacgtcggtgttagtggcggtgatggcaacaacaacaacaacacttcctcgaccttgagagttcatcacgagatcgatctaccgcttaattcacctagatcagagattgtttctggctcttccggttcagatccgagtggtggatttgattctgctctcaatagaaaacatcagacttatggtcagttgcgagagagagttgtgaaaggcttgttgaggaagccgatgggatctgttgtctcggattttagtttgagagagaggaagaaacttggtcattggatgttttttgcgttttgtggtgtttgtttgtttttgggtgttttcaagatttgtgctactggttggcttggatctgccattgatggtgctgcttccgatcaggatttatctatcccccgagtaaatctacttgatcatagctcccatgattatatctataaagatggagggaatgatgttgatcctactttggttatggttgcttcagacgtggtgggtgatcaaaacagtgtagttgaattttcaggtgtctgggcaaaacctgagagtggaaatttctcgcggtgcattgacagttcaaggagtcgcaaaaagttgggtgctaatacgaatggctatcttctcataaatgctaatggaggactaaaccaaatgagatttgggatatgtgatatggttgcagtggctaaaattatgaaggcaactttggttcttccctcacttgatcacagctcatattgggcagatgacagtggctttaaggatctatttgattggcaacacttcattgaggagttgaaggatgatattcacatagttgagatgctgccatcagaattagccggaatcgagcctttcgttaagacacccatttcgtggtctaaggttggttactacaagaaagaggtccttccgttgttgaaacagcatatcgtaatgtacttaactcacactgattctcggcttgctaacaacgacctgcctgattctgtacaaaagcttcgttgccgagtaaattatagggcgctgaaatattcagctccaatagaggaactgggaaacgttctagtttctagaatgaggcaggacagaggtccataccttgctcttcatttaaggtatgagaaggatatgctggctttcacaggctgcagtcatagtttgacagctgaagaagacgaagaattacgacagatgcggtatgaggttagtcactggaaggaaaaagaaataaatggaacagagagaagattgcaaggtggttgtccgttgactccaagggaaacctcgcttttactgagggctttggaattcccatccagctcccggatatacctcgtagctggtgaagcatatggaaatggaagcatggatcctctcaacacagacttccccaacattttctcacattcaattcttgccaccaaagaagagctgagtccttttaacaaccaccagaatatgttggctggtttagattatatcgttgcacttcagagtgaggtatttctctacacatatgatgggaacatggcaaaagcagttcaaggtcacaggcgattcgaagacttcaagaaaacaataaatccagacaagatgaactttgtgaaacttgttgatgcattagatgagggaagaatttcatggaaaaagttcagttccaaagtgaaaaagctacataaagaccgaaacggagctccatataatagagagtcgggagagttcccgaagctggaagagagtttctacgcaaatcctcttcccgggtgtatttgtgagaatacagaagaagagggtctgatgcgacgtacataa

SEQ ID NO: 48 - protein, 652 aa, Arabidopsis thaliana
MGHHHDGGDGVPQHHVNSPRFSGPMTRRAQSFKRGGSAGSSSNNNNTHVGVSGGDGNNNNNTSSTLRVHHEIDLPLNSPRSEIVSGSSGSDPSGGFDSALNRKHQTYGQLRERVVKGLLRKPMGSVVSDFSLRERKKLGHWMFFAFCGVCLFLGVFKICATGWLGSAIDGAASDQDLSIPRVNLLDHSSHDYIYKDGGNDVDPTLVMVASDVVGDQNSVVEFSGVWAKPESGNFSRCIDSSRSRKKLGANTNGYLLINANGGLNQMRFGICDMVAVAKIMKATLVLPSLDHSSYWADDSGFKDLFDWQHFIEELKDDIHIVEMLPSELAGIEPFVKTPISWSKVGYYKKEVLPLLKQHIVMYLTHTDSRLANNDLPDSVQKLRCRVNYRALKYSAPIEELGNVLVSRMRQDRGPYLALHLRYEKDMLAFTGCSHSLTAEEDEELRQMRYEVSHWKEKEINGTERRLQGGCPLTPRETSLLLRALEFPSSSRIYLVAGEAYGNGSMDPLNTDFPNIFSHSILATKEELSPFNNHQNMLAGLDYIVALQSEVFLYTYDGNMAKAVQGHRRFEDFKKTINPDKMNFVKLVDALDEGRISWKKFSSKVKKLHKDRNGAPYNRESGEFPKLEESFYANPLPGCICENTEEEGLMRRT

SEQ ID NO: 49 - DNA, 1680 bp, Arabidopsis thaliana
atggcgaaatcgatgagaactatcaaaaatccattctttacttcgcatccgccatctccattcttccatctctctctcctcttcttcactcccctgaagaaatcaagtccccgatacctaaaccaccatcaccaaactcgatgcccacctccacagtttttccttcttctcatctctctttctctcgttttctcgggaatttcatttctcacattttctttagacactggatcgtcaacttgcgtctccacatcttccgcttcctctctcaaattcttcatctccgatgtcgatcaccgtcagatcttaacctcccttgctgtatccggagcttccacgttgtttccgttaccggcgagaggaggacattccgggaatatgacggaggaagagaaagagttttggaaacaacccaatggtgaaggatacaagccttgtttggattttagtttggagtacaagaagaaatcagctagtgtttctaaagagaagaaacgattccttgttgttgttgtctctggtggacttaatcaacaacggaatcaaatcgttgatgctgttgtaatcgctatgattcttgaagctgctcttgttgttcctgttttgcaagtgaatcgagtctggggagacgaaagtgaattctcagatcttttcgatgtagagcatttcaagaaaacgctgagatctgatgttcgtatcgtttcttctctaccgtcaacgcatcttatgtctagacaaacaattgagaatcagattccttgggatgtttctccggtttggatccgtgctaaatacttcaagcagttgaatgaggaaggacttttggtgttgaaaggattggactcaaagttagccaagaatctaccgccggatctgcagaaacttcgatgcaaggttgctttccatgcactgagattcgcggcaccaattgagaatctcgggaacaaactcacgagaagaatgtggatagaaggtccatatattgctctccatttaaggctagagaaagatgtttgggtaagaaccggttgtctcactggattaggctcagaattcgatcggatcatagcagaaaccagaacgtctcagcctcgatacctcactggtagactaaacttgacctatacagagcgtagacttgctggtttttgtcctctcaatgtatatgagattgcaaggttgttgaaggctttgggagcacctagtaatgcgtcgatatatattgcaggaggtgaaccatttggtggctcacgagcattagagcctctcgctaaagagttctctaatttggtgacaaaggagacattggctcataaaggcgagctcttgccttacaccaatagatcttcagctttagcagctattgactacattgtatcacttagcagcgatgtttttattccttcccatggtggaaacatggcaaaagctatgcagggaaatagagcttatgtaggacacaggaagtttataatgcctaataagagagcgatgcttcctttaatggagaattcttctgtttcagatgccgagctcagttttctaactcggaagcttcaccgtaagtcccaaggctatcctgagtcacggagagggcggagagatcgtgacgtgatagcttatcctgtcccggagtgtatgtgtcgacatagaaaacacaggtctgtaggtttcttctag

SEQ ID NO: 50 - protein, 559 aa, Arabidopsis thaliana
MAKSMRTIKNPFFTSHPPSPFFHLSLLFFTPLKKSSPRYLNHHHQTRCPPPQFFLLLISLSLVFSGISFLTFSLDTGSSTCVSTSSASSLKFFISDVDHRQILTSLAVSGASTLFPLPARGGHSGNMTEEEKEFWKQPNGEGYKPCLDFSLEYKKKSASVSKEKKRFLVVVVSGGLNQQRNQIVDAVVIAMILEAALVVPVLQVNRVWGDESEFSDLFDVEHFKKTLRSDVRIVSSLPSTHLMSRQTIENQIPWDVSPVWIRAKYFKQLNEEGLLVLKGLDSKLAKNLPPDLQKLRCKVAFHALRFAAPIENLGNKLTRRMWIEGPYIALHLRLEKDVWVRTGCLTGLGSEFDRIIAETRTSQPRYLTGRLNLTYTERRLAGFCPLNVYEIARLLKALGAPSNASIYIAGGEPFGGSRALEPLAKEFSNLVTKETLAHKGELLPYTNRSSALAAIDYIVSLSSDVFIPSHGGNMAKAMQGNRAYVGHRKFIMPNKRAMLPLMENSSVSDAELSFLTRKLHRKSQGYPESRRGRRDRDVIAYPVPECMCRHRKHRSVGFF

SEQ ID NO: 51 - DNA, 1569 bp, Arabidopsis thaliana
atggtgaaacacagaaactcatctcgctcgataatctcatattcttcttcaatagcaagattcttctctagaaaagctatttctctctacttgatcttcgtctttgcttttaccatctgggttctcgtcttcagctccagaaacattcaaaccgatgatgaccacaccaaacatcaacaacaacatcatcgggatctaatcgattcagaatcatttccgccaccgtatttgcctcctaggaagaatttgcagaaaccgtatgaaaatactcaactttggactcctcctttcagctttgggttgcatccatgtgtcaaacctactccgaaatacaaagaattttcagaatcagatcattatataacagtgaaaagtaatggtggactaaatcaaatgcgtactggtatagcagatatagtggctgttgcgcacatcatgaatgcaactttagtcattcctgagctggataagcgatcgttttggcaagattcaagtgttttttcagatatttttgacgaggaacaattcattaaatcattgcgaagagatgtcaaggttattaaaaagctcccaaaggaagtggaatctctacctagagcaaggaagcatttcacttcttggtctagtgttggatattatgaagaaatgactcacttgtggaaggagtacaaggtcatccatgtcgcaaaatcagattctcgccttgcaaataatgacctgcctatcgacgttcaaagactgagatgtcgtgtactatatcgtggtctctgcttctctcctgcaattgaaagccttggacagaagctggttgagagactcaagtcacgtgctgggagatatattgcattgcacctgagatatgagaaagatatgttggctttcactggttgcacctatggtctcactgatgctgaatccgaagaactgagagtaatgcgggaaagtacaagccattggaagatcaaaagtataaattcaacagagcagagagaggaaggcctttgtccattgactccaaaagaagtgggaatatttctgaaaggtctcggatattctcagtcaacagtcatatatattgcagcaggggaaatctatgggggtgatgatagactctctgagcttaagtcgcgcttcccaaatctggtttttaaggaaacgcttgctgggaacgaagagttaaaaggtttcactggccatgcgactaaaacggctgctcttgattacataatttctgttgagagtgatgtgtttgttccttcacattctggaaacatggcaagagcagttgaaggtcaccgcagatttctagggcatcgcaggactatcactcccgacaggaaaggactagtgaaactcttcgttaagatggagagaggacagctaaaagaaggaccaaagttgtccaattttgtgaatcaaatgcataaagacagacaaggtgcaccgaggagaaggaaaggaccaacgcaggggatcaaaggacgtgcacggtttagaactgaagaagccttttatgagaatccatatccagagtgtatttgcagttcaaaggagcacaaagaaccctaa

SEQ ID NO: 52 - protein, 522 aa, Arabidopsis thaliana
MVKHRNSSRSIISYSSSIARFFSRKAISLYLIFVFAFTIWVLVFSSRNIQTDDDHTKHQQQHHRDLIDSESFPPPYLPPRKNLQKPYENTQLWTPPFSFGLHPCVKPTPKYKEFSESDHYITVKSNGGLNQMRTGIADIVAVAHIMNATLVIPELDKRSFWQDSSVFSDIFDEEQFIKSLRRDVKVIKKLPKEVESLPRARKHFTSWSSVGYYEEMTHLWKEYKVIHVAKSDSRLANNDLPIDVQRLRCRVLYRGLCFSPAIESLGQKLVERLKSRAGRYIALHLRYEKDMLAFTGCTYGLTDAESEELRVMRESTSHWKIKSINSTEQREEGLCPLTPKEVGIFLKGLGYSQSTVIYIAAGEIYGGDDRLSELKSRFPNLVFKETLAGNEELKGFTGHATKTAALDYIISVESDVFVPSHSGNMARAVEGHRRFLGHRRTITPDRKGLVKLFVKMERGQLKEGPKLSNFVNQMHKDRQGAPRRRKGPTQGIKGRARFRTEEAFYENPYPECICSSKEHKEP

SEQ ID NO: 53 - DNA, 1515 bp, Arabidopsis thaliana
atgaatccttatgatgcgaaagacagaagatggattctctctatgttcttcttcgtcgttttgttctgcaacaacgtttcgacttcgtcttcttcatctgaagttatcacgattaagccaagacatttatccttgctaaagagtgctttacaacggtcaagtggagaacagtctgatctatggaggccattgactgatcaaggatggagtccttgtattgatttgggaaattctccttcattaccggataaaaccgcgggatatgttcaggtatttcttgatggaggacttaaccagcaacgaatgggaatatgtgatgctgttgcagttgcgaagattttaaacgcaacactcgtgatcccttatcttgaagtgaatcctgtgtggcaagattcaagttcttttgttgatatttttgatgtcgatcattttatcgattctttaaaagatgacataagggtggttagagaactacctgatgaatactcttggagtacaagagagtattacggtacagcagtacgtgaaacacgagtgaaaaccgcgcctgttcatgcctctgcgaattggtatattgagaacgtctcaccagttctacaaagttatgggattgctgccatttctccattctctcaccggctatcattcgaccacttacctgctgagatccaacgactaagatgcaaagtgaatttccaagctttacgttttgtccctcacattacatcactcggtgatgctcttgtcagccgccttagaaacccgtcatggagaagcaataaggaacagaaaaatgttgatcatttaggagacatgaccaacccacacagaagacaagaacccgggaagtttgctgtgcttcatcttcgcttcgacaaggacatggctgcgcattcagcgtgtgattttggcggaggcaaagccgagaaactctccttggcgaaatacagacaaatgatttggcaaggaagagtgttgaattctcaattcactgatgaagagttaagaagtcaaggacggtgtcctctaacaccagaagaaatgggacttcttttagctgctttcggattcgataacaatactcgtctctatcttgcatcccacaaggtgtatggaggagaagctagaatctcaacattaagacaagtattcccaagaatggaagacaaaagaagtcttgcatcttctgaagaacgagctcgaatcaagggcaaagcttctttattagctgcacttgactactacgttagtatgcacagcgacattttcatctccgcatcacctggaaacatgcacaacgctcttgttggtcatcgaacattcgagaatctcaagacgatcagaccaaacatggcgttaataggacagcttttcctcaacaaaagcatcacttgggtagattttcagcaagcgcttggtgaaggacatgtgaatagacaaggacagatccggttaaggaaaccaaaacagtcgatttatacttatcctgctcctgattgtatgtgccatgtttga

SEQ ID NO: 54 - protein, 504 aa, Arabidopsis thaliana
MNPYDAKDRRWILSMFFFVVLFCNNVSTSSSSSEVITIKPRHLSLLKSALQRSSGEQSDLWRPLTDQGWSPCIDLGNSPSLPDKTAGYVQVFLDGGLNQQRMGICDAVAVAKILNATLVIPYLEVNPVWQDSSSFVDIFDVDHFIDSLKDDIRVVRELPDEYSWSTREYYGTAVRETRVKTAPVHASANWYIENVSPVLQSYGIAAISPFSHRLSFDHLPAEIQRLRCKVNFQALRFVPHITSLGDALVSRLRNPSWRSNKEQKNVDHLGDMTNPHRRQEPGKFAVLHLRFDKDMAAHSACDFGGGKAEKLSLAKYRQMIWQGRVLNSQFTDEELRSQGRCPLTPEEMGLLLAAFGFDNNTRLYLASHKVYGGEARISTLRQVFPRMEDKRSLASSEERARIKGKASLLAALDYYVSMHSDIFISASPGNMHNALVGHRTFENLKTIRPNMALIGQLFLNKSITWVDFQQALGEGHVNRQGQIRLRKPKQSIYTYPAPDCMCHV

SEQ ID NO: 55 - DNA, 1389 bp, Carica papaya
atgagaatggacgagtcatcgcatataactcagataaagctgtgggcgctcggggcgagtaccatgttgctgctgttgtgggctggtatagttcaattgacgacaatgggagaaagcttggggttgggagcattcaagtatagaactttttattcttttccccctgaaagaggttatgccaacaaaggatacttaatggtttcatctaatggaggattgaatcaaatgcgatctggtatatgcgacatggttgttgttgcaaggtacatgaatgtcacatttgtagttcctgagttagacagaaactccttttggaatgatcagagcaacaaattccaagacatattcgatgtggattacttcatcaattcactgagagatgaggttgtgataatcaaagatctacctttccggctgaagagaaaaatttccagactcggcgttcattccatggcacctgttagctggtctaacatctcttattactacaatacggttcttcctcggatagaaacatatggattggtgcatctggcaaaaacagatgctaggcttgcaaataatggactgcctcaggaggttcagaagcttcgttgtcgagttaactacgaggccttgagattcacaacgccaatcgaggaattggggaagaagattgttagaattttaagggaaaaagggcctttcacggttcttcatcttcgatatgagaaagacatgttagcattctctggctgcactgaaggttgctcccaccaccaggccgaagaactcaaacacctaagatacaatatctcctggtggaaggaaaaggaaattgatgagaaggaaaaaaggaaagttggtctatgtccgttaactcccgaagaaactgcactggttttacgggcatttgacttcactcctgatatgcaaatttacattgccgctggagatatttatgggggagaaaccagattaaatgctctgagaaactcttttcccaatctggttaagaaggaaacgttacttccagcctcagacttgaagccattccagagccattccaaccagatggcagctctggactacttcgtatccttagcaagtgatatttttgttatgacttatcaaggccacatggctaagctcgttgaaggccatagaagatacttgggttacaagatgacaataaacgtggacaagaaggtggtggtgaaattaatagatgagtacagaaatggaacaatgaagtggaatgaattttgcagggcagtgaaggtagctcatgcaaatagaatcggaagtccaactgagagactcaagattcctggaaaacccaagttagaggattacttctacaccaatccacaggaatgtttgcctcaaatcaaaagcaacccagattaa

SEQ ID NO: 56 - protein, 462 aa, Carica papaya
MRMDESSHITQIKLWALGASTMLLLLWAGIVQLTTMGESLGLGAFKYRTFYSFPPERGYANKGYLMVSSNGGLNQMRSGICDMVVVARYMNVTFVVPELDRNSFWNDQSNKFQDIFDVDYFINSLRDEVVIIKDLPFRLKRKISRLGVHSMAPVSWSNISYYYNTVLPRIETYGLVHLAKTDARLANNGLPQEVQKLRCRVNYEALRFTTPIEELGKKIVRILREKGPFTVLHLRYEKDMLAFSGCTEGCSHHQAEELKHLRYNISWWKEKEIDEKEKRKVGLCPLTPEETALVLRAFDFTPDMQIYIAAGDIYGGETRLNALRNSFPNLVKKETLLPASDLKPFQSHSNQMAALDYFVSLASDIFVMTYQGHMAKLVEGHRRYLGYKMTINVDKKVVVKLIDEYRNGTMKWNEFCRAVKVAHANRIGSPTERLKIPGKPKLEDYFYTNPQECLPQIKSNPD

SEQ ID NO: 57 - DNA, 723 bp, Carica papaya
atggctatgaaaagcaagacccaccacaacgccaatgccaatgccactaacgacaacaatgtctacaactgtgagagctccgaaagtgccactaacagtaactctcccagtcccccaccatcacctcgccgtcactctaccaatggcacctctcactgccgccgccgtctccgatccaaaacccactccttctctcgccaggatgctctcgccgccgccgtcctcacccgccgaagtctccgttatctgctcctcctgcccatgttgtacgtctctggcctcttaatgtgcgtcgggcccttctccggtcttgtgggtcactcaccgcttcccggctccgtctaccgtagccacgagatctttcagaagctctgggctgatattcaggctgacaattcttcggctattgagttgtcatctgtctggaagtacaaacgtcggttgaaaatgcaaaagccttgtccaaattcaactgctggattacgttttgctatggaggaagtgtcctctggacctagtggttacttgattgttgaggcaaatggtggtctaaaccaacagcgttctgcgatatgcaatgcagtggctgttgctggacttctgaatgcaattttagttatacctcaatttgagttcaacagtgtctggaaggatgcaaggatatccaacatgcaatacagcaaataccccgtatattcgccccgcctctccacctcatcttaa

SEQ ID NO: 58 - protein, 240 aa, Carica papaya
MAMKSKTHHNANANATNDNNVYNCESSESATNSNSPSPPPSPRRHSTNGTSHCRRRLRSKTHSFSRQDALAAAVLTRRSLRYLLLLPMLYVSGLLMCVGPFSGLVGHSPLPGSVYRSHEIFQKLWADIQADNSSAIELSSVWKYKRRLKMQKPCPNSTAGLRFAMEEVSSGPSGYLIVEANGGLNQQRSAICNAVAVAGLLNAILVIPQFEFNSVWKDARISNMQYSKYPVYSPRLSTSS

SEQ ID NO: 59 - DNA, 1305 bp, Carica papaya
atgcgtgctgggatatgtgatatggtagctgtagcccggattataaatgccacccttgtagttcctgaacttgataaacgatcattttggcaagactccagcaacttttcggatgtttttgatgaagatcactttattaaaactttggcttttgatgttaaagtcataaagaagctcccaaaggaaatttcttcagctaccaaagttgttaagcattttaaaagtggatctggtatggattactatcaggatgagatttttagcatgtgggacgaatatcaagttattcgagcggccaaatctgattctcgtctagcaaataacaatttaccttcagatattcaaaagctacgttgtcgtgcttgctatgaggcccttcggttttctcctcgaattgaagcaatgggaaaattgttggtggaaaggatgaggtcttatggtccttacatcgcgttacatttaagatttgagaaagatatgcttgcatttagtgggtgcaatcatgatttaactcccagtgaggctgctgaactgaggaaaatcagagaaaatactgcatattggaaagtgaaggacattgatggcagagaacagagatccaagggttattgccccttaactcccaaggaagttggaatatttcttacagctcttggatatccatctagtactcctatatatattgctgctggcgagatatatgggggtgattctcgcatggctgacctgcgatcacgttatccaatgttaatgagcaaggagaaattggcttctgttgaagagcttgagccatttatcaaccatgcatctcagatggctgcacttgattacattgtgtccgttgaaagtgatgtatttatcccgtcatatactgggaacatggcaagggcagttgaaggtcatcgtcgatttctaggccataggaaaacagtatctcctgacaggaaagcccttgtgcgattgtttgataagatcaaacgtggagcactcaaagaaggcaaaagactatcagatcgaataattgaaatccacaaaagcaggcaaggatcgcctcggaggagaaagggcccagtttcaggaacaaagggcatggagagattccgttcagaagaaccattttatgaaaatcctttaccagattgtttgtgtcgcaagcaattactaaatcaaaatgcttcggtcgtggtgagaaagatctcctatacatggctgtggcacatctttctcaacattatttattggaagtttaaggggcagctgccacttcagggaccagagacgcggaatgtgtatatcctggtttag

SEQ ID NO: 60 - protein, 434 aa, Carica papaya
MRAGICDMVAVARIINATLVVPELDKRSFWQDSSNFSDVFDEDHFIKTLAFDVKVIKKLPKEISSATKVVKHFKSGSGMDYYQDEIFSMWDEYQVIRAAKSDSRLANNNLPSDIQKLRCRACYEALRFSPRIEAMGKLLVERMRSYGPYIALHLRFEKDMLAFSGCNHDLTPSEAAELRKIRENTAYWKVKDIDGREQRSKGYCPLTPKEVGIFLTALGYPSSTPIYIAAGEIYGGDSRMADLRSRYPMLMSKEKLASVEELEPFINHASQMAALDYIVSVESDVFIPSYTGNMARAVEGHRRFLGHRKTVSPDRKALVRLFDKIKRGALKEGKRLSDRIIEIHKSRQGSPRRRKGPVSGTKGMERFRSEEPFYENPLPDCLCRKQLLNQNASVVVRKISYTWLWHIFLNIIYWKFKGQLPLQGPETRNVYILV

SEQ ID NO: 61 - DNA, 1968 bp, Carica papaya
atggtttttaaatctaagataaagtggatagcgctttttgtgctgattttgtccgttgcatccttggttatccatctttccatgaccaagttttcatctgttgatttagttcagtatagcacaatggctggtctaattcaggatttggctttaccgttaggggcccaggcttctaggaataagaagctatgggggaatgtgaagtctctggagccattgcagccttatgccaacccaagaagcagctatcctgtcccaaatgaaaagaacaacggtttcatctatgccaaagtttttggtggatttgagagcataagaccttcgatctgtgatcttgtcaccatatccaggcttctaaatgctactcttgtcattccagagattcaagaagctcttcgctcaaaaggcatcagttataaattcaagagcttctcctatctctatgatgaggagcattttatagcatctctccaaaaagatgtaataattgtgaagagcctgcctgaaaatttgaagggtgcaagaaaaaggaatgagttccctacctttaaacccaaaagctctgcttctccagatttttatgtcaatgaaattttgccaaagttaaagaaagcaaaggttattggattggttcttaataaaggaggatgtttgcagtcagtccttccttctactatgtccgagtttcaaaggcttagatgcagagttgcgttccatgcactccaatttcgacgagaaattaagttactgggacgccggatggtggagaggttacgaggattgggccgtccttttttagcttttcatcctggcttggtgagggacaaattggcatttcatggctgtgctgaactttttcaggatgttcacactgaactgatccagtatcggagagcacagatgatcaagcaaggaattcttaaagaagaactaagtgtagtctcacacttacggagagacaacggttcatgtcctctcatgcctgaagaggttggagttcttcttagagcattgggatatcctccccaaacaattatatacctggcaggttctgaaatatttggtggtcagcgtgttctaatccccctacgtgctatgtttgccaacttagtggatcacacttccttatgtagcaaaaacgaattgtctgaattattcggccctgaagcccctcttcctctagatctctttcaaatgcctcctatcaaaagtgaaaaacaacttaaggaagaatggaacagagctggacctcggccacgacctcttccaccacctccagacagacccatctaccaacatgagaaagagggctggtatggttggatcactgagaaggatacagaaccagatccttcacctatggatttgcgaatgcaagcacacagattagttttggatgcacttgattatattgtttctgtggaagctgatgcattctttcctggttttaataatgatggtaacggatggccagatttctcaagtttggtcatgggacaaaggctatatgaaagggcttcatctagaacctatagaccggacaggaaagtaattcaagagctacttaacatcacccgtgataatatgtaccatccgaagcgtaactggactgttttgttgaaggaacatctcaacaaaagcctggatgaagatggcctcatcaggcaatctctactgtcaaaacgcagttcatttctatcgcaccccctccctgaatgttcttgcagaatttcatctattgggctatcaagaagacggaaagatggtgatggacgatttctgtatggaggtgaagatgagtgtccaaaatggatatcagctggagcagaaagggataagaatgatgatgtggagtcactagaatatgaaagtgacttgtctgatcagcccgaacctgatgaagatgctgccaaaaatagtgacagtctaccctttgatcatgatgatgaatgggatcctaatgactag

SEQ ID NO: 62 - protein, 655 aa, Carica papaya
MVFKSKIKWIALFVLILSVASLVIHLSMTKFSSVDLVQYSTMAGLIQDLALPLGAQASRNKKLWGNVKSLEPLQPYANPRSSYPVPNEKNNGFIYAKVFGGFESIRPSICDLVTISRLLNATLVIPEIQEALRSKGISYKFKSFSYLYDEEHFIASLQKDVIIVKSLPENLKGARKRNEFPTFKPKSSASPDFYVNEILPKLKKAKVIGLVLNKGGCLQSVLPSTMSEFQRLRCRVAFHALQFRREIKLLGRRMVERLRGLGRPFLAFHPGLVRDKLAFHGCAELFQDVHTELIQYRRAQMIKQGILKEELSVVSHLRRDNGSCPLMPEEVGVLLRALGYPPQTIIYLAGSEIFGGQRVLIPLRAMFANLVDHTSLCSKNELSELFGPEAPLPLDLFQMPPIKSEKQLKEEWNRAGPRPRPLPPPPDRPIYQHEKEGWYGWITEKDTEPDPSPMDLRMQAHRLVLDALDYIVSVEADAFFPGFNNDGNGWPDFSSLVMGQRLYERASSRTYRPDRKVIQELLNITRDNMYHPKRNWTVLLKEHLNKSLDEDGLIRQSLLSKRSSFLSHPLPECSCRISSIGLSRRRKDGDGRFLYGGEDECPKWISAGAERDKNDDVESLEYESDLSDQPEPDEDAAKNSDSLPFDHDDEWDPND

SEQ ID NO: 63 - DNA, 1155 bp, Carica papaya
atgaaggttcagtaccagagctttgtctttcagactcaaagaagaggagctcttgctgggctttttcttattctgtttcctgttttcttgccttgtttgtttactcccttcagccatgcttcgccttccttgttctcggaatggaatactcctaaacctaggcacttgccacttcttaagagcgctttacatcgtcaaagttcagattcagagcagtctgatctctggatgcctttggctgaccaaggatggagaccattcgtccagtctaaagatgcctcctcagtaccagagaaatctgagggatacctgcaggtatttctagatgggggtttaaaccagcagagaatggggatatgcgatgcagttgcagttgctaagatactgaatgcaactcttgtgatcccctatcttgaagtgaatcctgtatggcaagattcaagttcattcgtggatatatttgatgtggatcactttgttaatgtactgaaggatgatatttctatagttaaagaactgcctgctgaattctcatggagcacaagagagtattatgccaccgcgatccgagctaccagaattaaaacagcacctgtacatgcttctgccaattggtatctagagaacttcactgatgaagaattgcgaagtcaggggcgttgcccactgactccagaagagataggattgctcctagcagccctgggttttgacaactgtactcgcctttatcttgcctctcacaaggtgtatggaggggaagctagaatttcaactttaagaaaattgtttccactaatggaggacaaaaagagccttgcctcttcggaggaacgtgcccgcatcaaaggaaaagcttctttgctagctgcagttgactactatgttggcatgcacagtgatatctttgtctctgcttctccaggaaatatgcacaatgcattggtgggacatcgaacttacgaaaacttgaagacaataaggccaaatatggccttatcggggcaactcttcctgaacaaaagcattacttggagcgagtttcagcgagcagttgttgaagggcatgaaagtagacaagggctgatcaggttaaggaagccaaaacaatccctttacacgtatcctgctccggattgcatgtgcggtgtttaa

SEQ ID NO: 64 - protein, 384 aa, Carica papaya
MKVQYQSFVFQTQRRGALAGLFLILFPVFLPCLFTPFSHASPSLFSEWNTPKPRHLPLLKSALHRQSSDSEQSDLWMPLADQGWRPFVQSKDASSVPEKSEGYLQVFLDGGLNQQRMGICDAVAVAKILNATLVIPYLEVNPVWQDSSSFVDIFDVDHFVNVLKDDISIVKELPAEFSWSTREYYATAIRATRIKTAPVHASANWYLENFTDEELRSQGRCPLTPEEIGLLLAALGFDNCTRLYLASHKVYGGEARISTLRKLFPLMEDKKSLASSEERARIKGKASLLAAVDYYVGMHSDIFVSASPGNMHNALVGHRTYENLKTIRPNMALSGQLFLNKSITWSEFQRAVVEGHESRQGLIRLRKPKQSLYTYPAPDCMCGV

SEQ ID NO: 65 - DNA, 1968 bp, Carica papaya
atgtcgtcgggtggttcgaataaccccaccggcgggagtcccctagcggcggcgggtcctaccaccacaaggcgacgagtggcggattcccaggacgtctccgagagaccttcaaattcctccgactaccacagtgttaacaccgccaccaacaccgtcggtaatattaacggtagcaccacggccagtaacagaaacagcaacgtcagcctttcctttgacttggacgaagaggacaaccccaacggctcttactattctgccctaggtggttcccaactccaccattaccaacaccatcctgtaatcaggtatctgcagtttcgccggaagaccttgctttgcgtgcctgaggcttggcttttcaagatcgaagactgctgtcattggacggctgccatggcgcagaggttgggatcggggaggaacgctggccggaggatccttgcgttactcatggtccttttggttttctctgtgtttttgagggtttcgctactcactagcggcgtcgaggtcgagaggaagaggaaagaggttatcaatatgttcatattgcaggttcagcaggatggctcatccgttcaacacgctctcgccgagaatcatgcctcctctatgcccaaacgtgttttggagagattgtctactccagaaatatggatgaaacccaacagcgacagttatcatcaatgtatagctcgacccagaaagccacaaagaatgcgttccaaaactaatgggtatcttgttgttcatgcaaacgggggattgaatcaaatgagaactgggatatgtgatatggttgctgttgccaagataatgaatgctaccctggttcttccgttgctcgatcatgagtcattttggacagatccgagcaacttcaaagacatttttgactggagacactttatggaagcattaaaagacgacattgatattatagaatatttacctaccaaatatgctgcgctgaaacctctggtgaaggcccctgtttcatggtcaaaggctagttactacagaagtgagatgctcccattgttaaagcggcataaggtgataaagtttacacacactgattcacgtctagctaacaatggtctggcatcatccatccaaaggctgcgatgccgtgccaacttccaggctcttcggtacactaaggagattgaagaccttggaagggttttggttgacagactaaggaaaaatagcgagccatatattgcgctgcacctaaggtacgagaaagatatgcttgcatttactggctgcagccacaaccttactgcagaagaggctgaagatcttagaatcatgaggtataatgttaaacattggaaggagaaagagatagacagcaaagaacggcgacttcaagggggatgcccaatgtcccctagagaggcagccttgttccttaaggctttgggttacccctcgactacaactatctacatagtggcaggggagatatatggcagcaatagcatggctgcctttcgttcagagtttccgaatgtcttctcacattccactcttgcaactgaggaagaattagagcccttcaagccatatcaaaatcgtcttgctgccttggattacattgtggcagtagaaagtgatgtatttgtttatacatatgatggaaacatggccaaggcagtacaggggcacaggaggtttgaaggatttcgcaagaccataaatcctgacagacaaaattttgttacactgattgatcaattggacgagggtgtgatgtcttgggaaggattctcttcagcagttacgagtctacattcagacaggctaggatcaccatatcttagacagccaggcgagtcacccaggctggaggagaacttctatgcaaatccttttcctggttgtatttgcaacaggtctcaagagcaaacaaagcttcccagacccactctgctggttggaacacagagatag

SEQ ID NO: 66 - protein, 655 aa, Carica papaya
MSSGGSNNPTGGSPLAAAGPTTTRRRVADSQDVSERPSNSSDYHSVNTATNTVGNINGSTTASNRNSNVSLSFDLDEEDNPNGSYYSALGGSQLHHYQHHPVIRYLQFRRKTLLCVPEAWLFKIEDCCHWTAAMAQRLGSGRNAGRRILALLMVLLVFSVFLRVSLLTSGVEVERKRKEVINMFILQVQQDGSSVQHALAENHASSMPKRVLERLSTPEIWMKPNSDSYHQCIARPRKPQRMRSKTNGYLVVHANGGLNQMRTGICDMVAVAKIMNATLVLPLLDHESFWTDPSNFKDIFDWRHFMEALKDDIDIIEYLPTKYAALKPLVKAPVSWSKASYYRSEMLPLLKRHKVIKFTHTDSRLANNGLASSIQRLRCRANFQALRYTKEIEDLGRVLVDRLRKNSEPYIALHLRYEKDMLAFTGCSHNLTAEEAEDLRIMRYNVKHWKEKEIDSKERRLQGGCPMSPREAALFLKALGYPSTTTIYIVAGEIYGSNSMAAFRSEFPNVFSHSTLATEEELEPFKPYQNRLAALDYIVAVESDVFVYTYDGNMAKAVQGHRRFEGFRKTINPDRQNFVTLIDQLDEGVMSWEGFSSAVTSLHSDRLGSPYLRQPGESPRLEENFYANPFPGCICNRSQEQTKLPRPTLLVGTQR

SEQ ID NO: 67 - DNA, 1686 bp, Carica papaya
atgcacgcgaagaaccggctgccaagcagcggccacaccaccccgtcgccaccaccctcgccgctccgttcccctcgctaccgccacggccggtccaaagggggtcggttccccccggtccagccgggccggaccattgcccatcgtcttgcttggctgctcctctctgtgctccttcgtcgtcagggtttctttctcttcgctcccctaatctacatctcgggtatgcttctctacatgggcactgtgtcttttgatgtggttcccgttatcaagcaccgacccgctcccggctccgtttacaggagtccccaggtgtacgcaaagctacggcccgagatggatgcggataattcatctgatgctatatcaactatatggaaacactcatataaaagcggggaatggaagccatgtgtaaacaggtcttctggaggcttacctgagtctaatggttacatatatgttgaggcaaatggtggcctaaatcagcagcgaacatcgatatgcaatgctgttgctgtggctggctaccttaatgcaacccttgtaattcccaactttcattatcatagcatatggagagatcctagcaaattcaaggacatctatgatgaggattattttgtacaaaccttggagaatgatgtacaagtggttgataagattcccgaatatttaatggaacgttttgaccataacatgagcaatgtcttcaactttaaaataaaagcatggtcatccatcctgtactacagggattctgtcctaccaaagttgcttgaagaaaaggttataaggatttctccttttgcaaatagactatcatttgatgctcctccacctgtccagagacttaggtgcttggcaaactatgaagctttacgattttcaaaccctatattaacgttaggagaaactttggtttcaagaatgaaggaacgcagcattgataatggtggcaagtacatttctgtgcatcttcgttttgaggaggatatggttgctttctcatgttgtgtgtttgatggtggggaacaagaaaaacgagacatgattgccgcaagagaaagaggttggaaagggaaatttacaaaacctggtcgagttatacgaccaggagccatcaggctcaatggaaaatgtcctttaactcccctagaggttggtttgatgcttagaggaatgggctttgatgaaaggacatatatctatttggcatctggaaagatatacaatgctgagaaaacgatggctccacttttagaaatgttccctaatttgcagactaaagagacattggcatctgatgaggaacttgctccatttaagaacttctcttccaggatggctgctatagattacactgtatgtctccacagtgaggtgtttgtgactactcaaggggggaatttccctcattttcttatgggccataggagatacttatacggaggacattcgaagacaatcagaccagacaagcggaagttagcgctactctttgataatcctaatgttggatggaaaagtttcaagcgacagatgctaaatatgcggtctcatagtgattccaagggatttgagctgaagcggccaagtgattccatatacacctttccatgcccagattgcatgtgccgggcaaacaagacagaaaactcaagatcatcatcagccacatga

SEQ ID NO: 68 - protein, 561 aa, Carica papaya
MHAKNRLPSSGHTTPSPPPSPLRSPRYRHGRSKGGRFPPVQPGRTIAHRLAWLLLSVLLRRQGFFLFAPLIYISGMLLYMGTVSFDVVPVIKHRPAPGSVYRSPQVYAKLRPEMDADNSSDAISTIWKHSYKSGEWKPCVNRSSGGLPESNGYIYVEANGGLNQQRTSICNAVAVAGYLNATLVIPNFHYHSIWRDPSKFKDIYDEDYFVQTLENDVQVVDKIPEYLMERFDHNMSNVFNFKIKAWSSILYYRDSVLPKLLEEKVIRISPFANRLSFDAPPPVQRLRCLANYEALRFSNPILTLGETLVSRMKERSIDNGGKYISVHLRFEEDMVAFSCCVFDGGEQEKRDMIAARERGWKGKFTKPGRVIRPGAIRLNGKCPLTPLEVGLMLRGMGFDERTYIYLASGKIYNAEKTMAPLLEMFPNLQTKETLASDEELAPFKNFSSRMAAIDYTVCLHSEVFVTTQGGNFPHFLMGHRRYLYGGHSKTIRPDKRKLALLFDNPNVGWKSFKRQMLNMRSHSDSKGFELKRPSDSIYTFPCPDCMCRANKTENSRSSSAT

SEQ ID NO: 69 - DNA, 1962 bp, Carica papaya
atggccgtaagtaataacaataatggcttccctaccaattccgttcttgaactagatgacaagccaagggctctgcaatcgaaagcggatcgagagaaatccgaatttcctgactttcgtgttatagatgggtcccgaaacagtccaagaagctgtcagagctcgccgattcagtcaccgagactcgggccaagcaggttctcgagtggcagtgatcattccagatcgggttctatgccaaacttgttgggggttgtttgggatcgaaagcggccggcgaagagagcgaagagaatgaagtcttggtaccagagaaagagagtgaaaggagttgttgctttgattgcagtgattgttttctttttcatggttaactggttgatgctttcacgtttacaagatggccgggtcggggccaaaaacatgtcgctagagaattcttcgtctggcaaagtttcggtatcgattcaggaaaatttgaaaaagtctggtagggggaaaaggaaacatagtgggacttatggaaggatgttgtctttggcagctcatgcgttggctgagggacagaataagcgtgagccaaaagatttgtggcaggagcccttggttcctgcttctgcttggaggccttgtgcagatcaacgtagctggatgccttgtgagggtaagaatggatatattatggtcactgcaaatggtgggatcaatcagcagcgagtcgctgtttgcaatattgttgtgatcgcacgattacttaatgcaactcttgttgttcccaagtttatgtacagtgatgtctggacggatgtgagtcaatttggcgatatctatcaggaggagcatttcactacctacttggcttctgatattcggatagtgaacgaactttctaaggagctacagtcattagacctggaagcaattggtagtgttgtgacagatgcagatatcccaaaggagtctaagccaagtttttatctgaaaaacattctccctattctgattaagaatggaatcatccattttgttggatttggcaatcgcttggcatttgacccaataccgtttcaattgcagagacttcgatgcagatgtaattttcatgcgctcagatttgtccccaaagttcaagaaactggtgctttgctcctcaaaaggttgcgtcagaatgcatcttatgttggagtactagatcgttatcttgttggtccatatgcggagtcagttttgaaggaaaagcaggggcacgcaaaaaaagcttccaaatatctagctctccatttgaggtttgaaattgacatggttgctcattctctgtgctactttggcggaggtgaaaaagagagaagagagttggaagcatatcgcgaaatccatttccctacgctgacatatcttgagaagggaaaaaagctaccttcccctgaagcgctaaggtcagagggcttatgtccattaacacctgaagaggcagtacttatgctcactgctcttggtttcaaccgtaagacacaaatatttgttgcaggtgcaaatatatatggagggaggtcaagattaatttctttgaccagcttgtatcccaatttgatcactaaagagaatttgctttcatcgagggaactcgaaccattcatgaatttttcctctcagctggcagcactggacttcatcggttgcactgctgctgatgcattcgccatgacagactcgggaagtcagttgtcatctttggtgtctggttatcgaatatactatggtggggggagaatgccaacaatacggcctaacaagcggaggcttgctgacatcttcttgaagaacaacaccatagagtggaaaatatttgagcagagagtgaggaaagcagttaggcaaactaaacatgtccagtcaagacccaaagggaggagtatttaccggtacccgagatgtatggaatgtatgtgccttggtcaatag

SEQ ID NO: 70 - protein, 653 aa, Carica papaya
MAVSNNNNGFPTNSVLELDDKPRALQSKADREKSEFPDFRVIDGSRNSPRSCQSSPIQSPRLGPSRFSSGSDHSRSGSMPNLLGVVWDRKRPAKRAKRMKSWYQRKRVKGVVALIAVIVFFFMVNWLMLSRLQDGRVGAKNMSLENSSSGKVSVSIQENLKKSGRGKRKHSGTYGRMLSLAAHALAEGQNKREPKDLWQEPLVPASAWRPCADQRSWMPCEGKNGYIMVTANGGINQQRVAVCNIVVIARLLNATLVVPKFMYSDVWTDVSQFGDIYQEEHFTTYLASDIRIVNELSKELQSLDLEAIGSVVTDADIPKESKPSFYLKNILPILIKNGIIHFVGFGNRLAFDPIPFQLQRLRCRCNFHALRFVPKVQETGALLLKRLRQNASYVGVLDRYLVGPYAESVLKEKQGHAKKASKYLALHLRFEIDMVAHSLCYFGGGEKERRELEAYREIHFPTLTYLEKGKKLPSPEALRSEGLCPLTPEEAVLMLTALGFNRKTQIFVAGANIYGGRSRLISLTSLYPNLITKENLLSSRELEPFMNFSSQLAALDFIGCTAADAFAMTDSGSQLSSLVSGYRIYYGGGRMPTIRPNKRRLADIFLKNNTIEWKIFEQRVRKAVRQTKHVQSRPKGRSIYRYPRCMECMCLGQ

SEQ ID NO: 71 - DNA, 1962 bp, Carica papaya
atgggtcaccaccaccaccatcacaacaccactgatggcgtctctcagatagttaatagcccgcgcttctcgggtcccatgacccgccgagctcactccttcaagcgcaataacaatggaagcacccataacaattccaacaccgccaacaatacctctaccaacaatggcaacaactgtagcagcactagttgttcctctgttttaaccacccaccatgaaatcgatctgcatctcaactcacccagatccgagattactcccagctctgcatcctctgatgggttcgattccatactgcagatggagaagaagtacacctaccataacctgagagagagagaggtgaagagtctattgaagaagcctataggatctacggttttggagttggggataagggagaggaagaaactcggccactggatgttcttggttttctgtggggtgtgcttatttttgggtgtcttcaagatttgtgcaactggttggtttggatctactattgaaatggcttcttccaatcaggatttatctgacccctccatctctcagttaaatctaatcagtcaagactcacacaagtacggctatagggaaggagggagtgatgttgaacgcaccctgatgatggtagcatcaggtgttgtcggtagccagaatggcatggcagcatattcaggtatctgggcaaaaccaaacagcgagaatttcactaagtgcattggcagtggaagaagttctaaaaggctagatgcaaatacaaatggttatattctcataaatgctaatggtggcttgaatcagatgagatttgggatttgcgatatggttgccgtggctaagatcatgaaggcaacactcgtccttccttcacttgatcacacctcatactgggctgataacagtggctttaaagatctgtttgattggcaacacttcattgagacattgaaggatgatatccacatagttgagacactaccacctgccttcagcggaattgagccttttgttaaaacaccaatatcttggtccaaggttagttattacaaaacagaggtcctccctttgttaaagcagcacaaaatagtgtactttacacattctgactcccggcttgccaacaatggcctcccgacttccatacagaagctgcgatgccgtgtgaattacaaggcattaaagtattcaactccaattgaagaacttgggagcaccttggtttctagaatgtgtcggaatggaagcccttatcttgctcttcatttgaggtatgagaaggatatgcttgcattcacaggctgcagccataatttgacatcggaagaagatgatgagctacgtcacatgcgatatgaggtcagtcattggaaggaaaaagaaattaatgggactgagagaagattacttggtggctgtcccttgacccccagggaaacttcccttttgctcagagcattggatttcccatctgataccaggatttacttggtagctggtgaagcttacgggaacggaagcatgcaataccttaaggatgattttcccaacatcttctcgcactccactcttgccacagaagaagagctgtatcctttcagaaatcaccagaacatgttggcaggtatagactatgttgttgccctgcagagcgatgtgtttgtttacacgtacgatggtaacatggcaaaggcagttcaaggtcacaggcgatttgagaacttcaagaaaaccatcaatccagacaagatgaattttgtgaaacttgttgatgaatttgatgagggtagaatttcttggaagaaattcagttctaaagtgaaaaagcttcacagagatcgagtaggaggtccatatttaagggagccgggagagtttcctaagcttgaggagagtttctatgcaaatccttacccaggatgcatctgtgaaaatgaaacaatacaacagaagaggtag

SEQ ID NO: 72 - protein, 653 aa, Carica papaya
MGHHHHHHNTTDGVSQIVNSPRFSGPMTRRAHSFKRNNNGSTHNNSNTANNTSTNNGNNCSSTSCSSVLTTHHEIDLHLNSPRSEITPSSASSDGFDSILQMEKKYTYHNLREREVKSLLKKPIGSTVLELGIRERKKLGHWMFLVFCGVCLFLGVFKICATGWFGSTIEMASSNQDLSDPSISQLNLISQDSHKYGYREGGSDVERTLMMVASGVVGSQNGMAAYSGIWAKPNSENFTKCIGSGRSSKRLDANTNGYILINANGGLNQMRFGICDMVAVAKIMKATLVLPSLDHTSYWADNSGFKDLFDWQHFIETLKDDIHIVETLPPAFSGIEPFVKTPISWSKVSYYKTEVLPLLKQHKIVYFTHSDSRLANNGLPTSIQKLRCRVNYKALKYSTPIEELGSTLVSRMCRNGSPYLALHLRYEKDMLAFTGCSHNLTSEEDDELRHMRYEVSHWKEKEINGTERRLLGGCPLTPRETSLLLRALDFPSDTRIYLVAGEAYGNGSMQYLKDDFPNIFSHSTLATEEELYPFRNHQNMLAGIDYVVALQSDVFVYTYDGNMAKAVQGHRRFENFKKTINPDKMNFVKLVDEFDEGRISWKKFSSKVKKLHRDRVGGPYLREPGEFPKLEESFYANPYPGCICENETIQQKR

SEQ ID NO: 73 - DNA, 1593 bp, Carica papaya
atgaaaaagattgagatgggtgattaccgcaagtctagttttgaagacactgaatatggagaggagaaagaaaagaagaattcatatagtaagatgaagatgaggcacataaagatgatgacatctggaaagctgaggagcttgattctttctcggattcgaatggctcgattaaaattgtgggcggttcgtgcggtgagcatggggctattatgggccattgcaattcagttcagaccattgagtgacgcaattaagtcacatcctcccgcgtatcattttcctcatccggttcccccagagaggatctacaacaacaatggatatttgttgatttcatccaacggaggattaaatcaaatgcgatctggtatatgtgatatggttgcaatagcaaggtttttaaacgtcactatgattgttcctgaactggataatacctcattttggaacgaccacagtcaattttcagaaatatttgatgtagattatttcattatatcgttgcgagacgaactcagaatattgaaagaactgcctccccagcaaaagaaaaaagcatcagaaccgcttttcaccatgccacctattagttggtctaatatgacatactactataacgtgattcttccaaggatacaaaagcatgaagtggtgcatttccaaaaaactgatgcgaggcttgctaataatgggatccctgaagaggttcagaaactacggtgtaaagcgaattataaggcccttaaatttgctcctccaatacaggccttggcggagaaggtggtgcgtcttctcagagaaaaaggtccttttctggttcttcatctcagatatgaaatggatatggttgccttctctggttgcaacgaaggctgcaatcctcaagaagttgaagaattgacaaaaatgagatatgcttatccatggtggaaaaaaaaagtgatagactcggagaagaaaaggcaagcaggattgtgtcctctaacaccagaggaaactgcactgtcaatgcaagcgttgggtattgacagcaatatacaggtttatattgctgccggggatatatatggaggagaaagaaggttggcaacgctcagagcagcttatccaaatttggttaaaaaggaaactatattgccacctgaagagcttgagccaatcaagaactattcaaaccagatggcagccctggattatcatgttgcagtagaaagtgatatcttcgttcccaccaatggtggaaacatggcgaaagttgtggaaggccaccgaaggttcttgggattcaagaaaacaatacttctggacagaaaggctctggttgatttgattgatttgtatagaagtggagcaataaactgggaagaattctcgagtgaagtaaaagaagctcatgcagacagagtaggaaacccaacaaaaagactggtggttcctggaaaacccaaggaagaagactacttttacaccaatccggaggaatgtttacaagttcctgaaccagtagtaaaagaggaaactactccaactgatgacaatacccaaaatgaagattctccaaatgatgaagaacctcgagaggatcagtag

SEQ ID NO: 74 - protein, 530 aa, Carica papaya
MKKIEMGDYRKSSFEDTEYGEEKEKKNSYSKMKMRHIKMMTSGKLRSLILSRIRMARLKLWAVRAVSMGLLWAIAIQFRPLSDAIKSHPPAYHFPHPVPPERIYNNNGYLLISSNGGLNQMRSGICDMVAIARFLNVTMIVPELDNTSFWNDHSQFSEIFDVDYFIISLRDELRILKELPPQQKKKASEPLFTMPPISWSNMTYYYNVILPRIQKHEVVHFQKTDARLANNGIPEEVQKLRCKANYKALKFAPPIQALAEKVVRLLREKGPFLVLHLRYEMDMVAFSGCNEGCNPQEVEELTKMRYAYPWWKKKVIDSEKKRQAGLCPLTPEETALSMQALGIDSNIQVYIAAGDIYGGERRLATLRAAYPNLVKKETILPPEELEPIKNYSNQMAALDYHVAVESDIFVPTNGGNMAKVVEGHRRFLGFKKTILLDRKALVDLIDLYRSGAINWEEFSSEVKEAHADRVGNPTKRLVVPGKPKEEDYFYTNPEECLQVPEPVVKEETTPTDDNTQNEDSPNDEEPREDQ

SEQ ID NO: 75 - DNA, 1206 bp, Carica papaya
atggagaaagaattaaaagtgaaaccagcaggtgttcggtctcctttagcttgtatggagcttgctataatggcaactttctccattttgctggtgctgtggttttctgtaacgaagttgataggcaatgagaaaagacttttagcgccaaaagagctgttcttttacccttacatttacccaccggaagtgaacgaggttcggatactgaaagagctgcctcaaaaagagaaaaggctcgttgaatcagaatcggtgtactgcatgtatcctattagttttgccagcatgaaatattactatgacaaggttcttcctcgcataaaggcccatcaagtcgtgcgtttcactctggctgatgccaggcttgctaataatggtctacctgatgaggttcaaaaactgcggtgtcgagcatattacaacgcaatgagatttacacaagaaattgaagagatgggtcaaaagattgttagcattctaaggcaaataggtcctttcttggttcttcatctcagatatgaaaaagacatgattgcattcacaggttgcacagaagggttcaccaaagaagagagtaaagagttgacaaagatgagatattcattcgcaggatggaaacattacccaattgattctaagagaagaaggcaattcggttcatgccctttgactccggaggaaacagccctttcattgcaagctctaggcattgacagtaacatgacaatttacatcgctgctggaaatatttatgcaaccgaaaagagaatggcagtactgaaatcagcttatcccaagatgcttaggaaggagactctactggaaccctcagaccttaaacccttccagaattattcaaatcagatggcagcattggattatatagtggcgttgaaaagtgacatttttgtccctacttttggaggaaatatggcaagggctgttgaaggccatagacgatacttgggattcaggaaaacaatacttctggataggatgattgcagtgaatctgatagatcttcaccggaacagaacactgagctggaaggatctctcagaaaaaatgaaggcagctcatgcagaaaaaatggggcaaccaacaagaagaatagagaaaccaaaccaaccaagatacgaggattatttctattctaatccacatgaatgtttgacgcaacttgcagaaccacctagcacataa

SEQ ID NO: 76 - protein, 401 aa, Carica papaya
MEKELKVKPAGVRSPLACMELAIMATFSILLVLWFSVTKLIGNEKRLLAPKELFFYPYIYPPEVNEVRILKELPQKEKRLVESESVYCMYPISFASMKYYYDKVLPRIKAHQVVRFTLADARLANNGLPDEVQKLRCRAYYNAMRFTQEIEEMGQKIVSILRQIGPFLVLHLRYEKDMIAFTGCTEGFTKEESKELTKMRYSFAGWKHYPIDSKRRRQFGSCPLTPEETALSLQALGIDSNMTIYIAAGNIYATEKRMAVLKSAYPKMLRKETLLEPSDLKPFQNYSNQMAALDYIVALKSDIFVPTFGGNMARAVEGHRRYLGFRKTILLDRMIAVNLIDLHRNRTLSWKDLSEKMKAAHAEKMGQPTRRIEKPNQPRYEDYFYSNPHECLTQLAEPPST

SEQ ID NO: 77 - DNA, 1251 bp, Carica papaya
atgtatagggctagaattcattcaatctcagagaaaaatgatatcaaggtttctatcctttcgagtgctcaggtaccagatgatcaactttggggtgcaactttcaacaatggccttcaaccatgtgtcagacccactgctaaatacaaagaggcccaagaatcacaccggtatatcactgtaaaaagcaatggaggactaaatcagatgcgtactggtatagcagacatggtggctgttgcacacatcatgaatgcaaccttagttattcctcaactggataagcgttcattctggcaagactcaagtacattttcagatatctttgatgaattccattttatctcgaccttacaaggagatgtgaatgttatcaaggagctcccaaaggagctggagtctgtcccaagggcccggaagcattttacttcctggtctggtgtggcttactatgaagaaatgacccatctgtggaaggactaccaggtaatccatgttgcaaaatctgattctcggcttgcaaataatgatttgcctattgacatacaaagattgagatgccgtgctctctattacgcgttgcacttctctccttcaattgaaagcttaggaaagaagcttgtcgagcgactgcggtcacgaacaggaagatatattgctcttcatctgagatatgaaaaagacatgctatctttcactggttgtactcatggtctgactgaggcagaatctgaagagctgagaataatgcgggagaacacaaaccattggaaggttaaaaagataaactcaacagagcagcgaatcgaaggcctttgtccccttactcccaaagaggtgggtatatttctacaagcccttggttaccctccctcaacttcaatttatgtggcggctggggaaatttatggcggtaatactcacctcttagagctcacatcccgtttcccaaatctagtttttaaggagaggctggctgaaccacaagagttgaagcaattcagtaatcatgcatctcaaatggcggcacttgattacattatttcagttgagagtgatgtgttcattccatcatattcaggtaacatggcaagagctgttgagggacaccgcagatttttgggccacctaaagacaatcatcccagacaggaaaggacttgtcaaactttttgacggccttgatagtggacagctgacagaagggtcatcgctatcacgtcttgtgcagcaaatgcacaagtataggtaa

SEQ ID NO: 78 - protein, 416 aa, Carica papaya
MYRARIHSISEKNDIKVSILSSAQVPDDQLWGATFNNGLQPCVRPTAKYKEAQESHRYITVKSNGGLNQMRTGIADMVAVAHIMNATLVIPQLDKRSFWQDSSTFSDIFDEFHFISTLQGDVNVIKELPKELESVPRARKHFTSWSGVAYYEEMTHLWKDYQVIHVAKSDSRLANNDLPIDIQRLRCRALYYALHFSPSIESLGKKLVERLRSRTGRYIALHLRYEKDMLSFTGCTHGLTEAESEELRIMRENTNHWKVKKINSTEQRIEGLCPLTPKEVGIFLQALGYPPSTSIYVAAGEIYGGNTHLLELTSRFPNLVFKERLAEPQELKQFSNHASQMAALDYIISVESDVFIPSYSGNMARAVEGHRRFLGHLKTIIPDRKGLVKLFDGLDSGQLTEGSSLSRLVQQMHKYR

SEQ ID NO: 79 - DNA, 1749 bp, Carica papaya
atggcgaaattaaagaagaagatttcttatatttcagttccatctcagataatcaactctctatcttcatcttcacttcaatctcttcttctctcaccaaagaaagcttcaaagaattcaagatggtttccttttgggtctaacttgtcatacagaagcccaaggttttggttcttgcttctctttctatttggtctgcttggtatgctaaagttggggttcaatgttgatcctttgatccctttttctccttacccatgtgctataactcaaccacaggactcaatctctaatggctacggacaaacccatctaggttctgctatcactactggaaccaatgttgataaatatgagattttgaatgctaatggtgaatctccggcgttaacacccacccagtattcaaaacaagatgtgggttttcaaaaacaagggttggtctccaaagggtacgagtcaaatgaggaaagtgagttttggaaacaaccagatgggttaggttacagaccttgcttggggtttagtggggagtacaagagacagagtgctgaaattgtcaaagacaggagaaagtatctgcttgtggtggtttctggcggaatgaatcagcagaggaatcagattgttgatgctgtggtgattgctaggattcttggtgctactcttgtcgtccctatcttgcaagtcaatgtcatctggggtgatgagagtgaattttctgatatatttgatttggagcacttcaaaagggtactggctgatgatgtgcgcatagtttcatcactgccttccacccatataatgacaaggccagtagaagaaaagaggactcctcttcatgtctctcctcagtggattcgatcgcgctatcttaagcggatcaatagggaaggtgttttgcttttacgtggcctagattccagactttctaaggatttgccttctgatctccagaagcttcgctgcaaggtggcatttcatgcactgaggtttgctccaccaattctggaacttggaaacaagcttgcagagaggatgaggagcaagggaccttaccttgcccttcatcttcgaatggagaaagatgtgtgggtgagaaccggttgtcttcctggtttgagccgagaatatgatgagatagtgaacaatgaaaggaaactgcggccagagcttttaactgctagatcaaacatgacttaccatgagcgtaaattagctggtctctgtcccttgaatgccatggaagtcgtcaggttgctgaaagctcttggagctccgaaagatgcaaggatctactgggccggagggcagccattgggtgggaaagaagccttactaccgctaactagtgaattcccccatttctataataagcaagatcttgcattgcctggtgaactagaaccatttgcaaacaaagcctctctcatggctgccattgattatatagtgtccgagaagagtgatgtcttcatgccatctcatggaggaaacatgggccacgcaatgcagggagacagagcgtatgcagggcacaagaagtatattactccaaacaaaaggcatatgcttccttatttcctcaatttctctctgcctgaagtggagttcaacaggatcataaaggagttgcacagtgaatccatggggcagccagaagtaaggactagtaaagtcggcagagatgttacaaagtacccgattcctgagtgtatgtgcaacgattcacgtggaaattccttgtga

SEQ ID NO: 80 - protein, 582 aa, Carica papaya
MAKLKKKISYISVPSQIINSLSSSSLQSLLLSPKKASKNSRWFPFGSNLSYRSPRFWFLLLFLFGLLGMLKLGFNVDPLIPFSPYPCAITQPQDSISNGYGQTHLGSAITTGTNVDKYEILNANGESPALTPTQYSKQDVGFQKQGLVSKGYESNEESEFWKQPDGLGYRPCLGFSGEYKRQSAEIVKDRRKYLLVVVSGGMNQQRNQIVDAVVIARILGATLVVPILQVNVIWGDESEFSDIFDLEHFKRVLADDVRIVSSLPSTHIMTRPVEEKRTPLHVSPQWIRSRYLKRINREGVLLLRGLDSRLSKDLPSDLQKLRCKVAFHALRFAPPILELGNKLAERMRSKGPYLALHLRMEKDVWVRTGCLPGLSREYDEIVNNERKLRPELLTARSNMTYHERKLAGLCPLNAMEVVRLLKALGAPKDARIYWAGGQPLGGKEALLPLTSEFPHFYNKQDLALPGELEPFANKASLMAAIDYIVSEKSDVFMPSHGGNMGHAMQGDRAYAGHKKYITPNKRHMLPYFLNFSLPEVEFNRIIKELHSESMGQPEVRTSKVGRDVTKYPIPECMCNDSRGNSL

SEQ ID NO: 81 - DNA, 1146 bp, Carica papaya
atgggattaaatgcagtgatattctctttaccttgcagtggcttccaaggtatttatgatgttgagcattttatccagacgctgagatatgatgtaaggattgtcgaaagcattccagcaattcgaaagaatgggaaaaccaagaagttaaaagcttatcagcttcggccacctcgagatgcccctattaactggtatacaaaaactgcgctggagaaaatgaaggagcatggtgctatatatcttactccattttcacatcgcttagctgaagaaatagacaaccctgaatatcaacgattgagatgcagagttaactatcatgctttgaggtttaagccacaaattatgaagctaagtgagtcgatagttgagaaactccgcgcacaaggccacttcatgtcaatacatcttcgttttgaaatggacatgctggcatttgcagggtgctttgacatatttaccccaaaagagcagagtatactgaggaagtaccgagaagaaaattttgcagagaaaaggcttgtttatagtgaaagaagggcgatcgggaaatgtccgctaaccccagaagaggtcggtcttatcttacgggctatgggatttgataattccaccaggatatacctggcggctggtgagctctttggtggcgagcggttcatgaaaccttttcgctccttgttccctcgccttgaaaatcacagttcagtggaccccacagaagagctagttacgaacacgagagggctgttagggtctgcagtggattacatggtctgtcttctttctgacattttcatgccaacatatgatggaccaagcaactttgccaataatcttcttggtcatcgtctttattatggcttccggactactatcagacctgacagaaaagctcttgctcctattttcattgatcgagagaatggtcatgtgtctggttttgaagaagcagtcaggcgtgtcatgctaaagacaaattttggtgggcctcacaagcggatttcgcctgaatcattctatacaaattcctggcctgaatgtttctgtcaaacatcaacccaaaacccagctgatagatcccctccagggaatgtttggaaattttggacaatcagttggagaaagggacacatgacttag

SEQ ID NO: 82 - protein, 381 aa, Carica papaya
MGLNAVIFSLPCSGFQGIYDVEHFIQTLRYDVRIVESIPAIRKNGKTKKLKAYQLRPPRDAPINWYTKTALEKMKEHGAIYLTPFSHRLAEEIDNPEYQRLRCRVNYHALRFKPQIMKLSESIVEKLRAQGHFMSIHLRFEMDMLAFAGCFDIFTPKEQSILRKYREENFAEKRLVYSERRAIGKCPLTPEEVGLILRAMGFDNSTRIYLAAGELFGGERFMKPFRSLFPRLENHSSVDPTEELVTNTRGLLGSAVDYMVCLLSDIFMPTYDGPSNFANNLLGHRLYYGFRTTIRPDRKALAPIFIDRENGHVSGFEEAVRRVMLKTNFGGPHKRISPESFYTNSWPECFCQTSTQNPADRSPPGNVWKFWTISWRKGHMT

SEQ ID NO: 83 - DNA, 404 bp, Carica papaya
atgaggaggttaggtcaccatcggctgcacggtaagcaaggtgcgggagttaaaggtatgttagtcaagcttggcatcgcagttgtcgttctcttgatctgcactctttcgcttttcttctcggcaactaccagtgagaatcgcggatcgagcggtccgtcggagatcaatgtagaggaactttgggcaagtgccaactctggtggttggagaccatcatcagctccacgatcagactggcctcctcctccaaaagagagcaacggttatctccgcattcgttgtaatggtggtctgaatcagcagcgtagtgcgatttgtaatgctgtgcttgctgcccgaatcatgaatgctacactcgtgctgcccgagttggatgcaaattcgttctggcatgatgacag

SEQ ID NO: 84 - protein, 134 aa, Carica papaya
MRRLGHHRLHGKQGAGVKGMLVKLGIAVVVLLICTLSLFFSATTSENRGSSGPSEINVEELWASANSGGWRPSSAPRSDWPPPPKESNGYLRIRCNGGLNQQRSAICNAVLAARIMNATLVLPELDANSFWHDD

SEQ ID NO: 85 - DNA, 1461 bp, Oryza sativa
atggtggtggcggcggggcacggcgggcggcggaggcgggcgtggaggtgggcgatgagggcggcggcgagcgccgtggtgtggacggcggtggtgcagctggcgtcgatcgccgggctgtggaggccgcgggtgctcgccgactgcggcggcgggggcggcgccgccacggggctcgccgcgctcgccggcgaggaccgcgtcgcggcgaggctgtcgccgccggcgctcgtgcccaggagaatttataagagcaatggctatttactggtgacttgcaatggaggactcaatcaaatgcgagctgggatatgtgatatggtgaccatagctcgctatttgaatctaacattagtggtgcctgaactggataagaggtctttttgggctgactcaagtgaatttggagatatctttgacgtcagtcacttcattaattcgttaagagatgagctgatgattgttaaggaacttcctatgaaactcaagttaaaaactaagagaagactttactcaatgccacctgtgagctggtccaacgagacatactatctaaagcgggtattacgtcttgcaaggaagcacaaagtgatccatttcaataaaacagatgcccgccttgcaaacaacggtcttcctgtcaagctccaaaggctgcgttgccgtgtcaactttgaggctttgagattcaccccacagattgaggcccttggacgaaaacttatctccacccttcaaaaaagtgggcaatttgttgttctacacttacgatatgaaatggatatgctttccttttcgggctgcacacacggttgttctgatgaagaaaccgaagagctcactagaatgagatatgcatatccatggtggaaagaaaaggagatagactctgaggttaagaggtttcagggactttgtccccttacacccgaggaaattactctggtgcttaaagctctaggatttaaaaaggatacactgatttatatagcctctggtgaaatctatggaggtgaaaggcggttggcagctttgaaggctgcatatcctagattggtacggaaggagaaacttttatctcctgaggaattgcagccattccagaaccactcaacccagatggcagcactggactacatggtttcaatagcaagcgatgttttcatccccagttatgatggaaatatggcaagggttgttgaaggccatcgcagatacacgggcttccgcaagaccatcctattggacagggtgaaacttgttgaacttttggatagtttccaaggaggtgcaatgtcctggaatgaattctctgctgctgtgaagaaggcacaccagcatcgcatgggtcagccgacagaaagaaaggtcatccctggccggcccaaggaagaggactatttctatgctaatccccaagaatgccttggttcaagggagggattaagagatattttgtga

SEQ ID NO: 86 - protein, 486 aa, Oryza sativa
MVVAAGHGGRRRRAWRWAMRAAASAVVWTAVVQLASIAGLWRPRVLADCGGGGGAATGLAALAGEDRVAARLSPPALVPRRIYKSNGYLLVTCNGGLNQMRAGICDMVTIARYLNLTLVVPELDKRSFWADSSEFGDIFDVSHFINSLRDELMIVKELPMKLKLKTKRRLYSMPPVSWSNETYYLKRVLRLARKHKVIHFNKTDARLANNGLPVKLQRLRCRVNFEALRFTPQIEALGRKLISTLQKSGQFVVLHLRYEMDMLSFSGCTHGCSDEETEELTRMRYAYPWWKEKEIDSEVKRFQGLCPLTPEEITLVLKALGFKKDTLIYIASGEIYGGERRLAALKAAYPRLVRKEKLLSPEELQPFQNHSTQMAALDYMVSIASDVFIPSYDGNMARVVEGHRRYTGFRKTILLDRVKLVELLDSFQGGAMSWNEFSAAVKKAHQHRMGQPTERKVIPGRPKEEDYFYANPQECLGSREGLRDIL

SEQ ID NO: 87 - DNA, 1005 bp, Oryza sativa
atggagaggtttggtcacaatttgagtaatgtgtttaatttcaagataaaggcttggtcttctatccgatactacaaagaagctgttcttcctaagttgatcgaagaaaggcttataaggatatcaccttttgcaaaccgactgtcctttgatgctccatcagctgttcaacggttgagatgtctggctaattttgaagccttaaagttttctaagccgatcacaactttatctgacattttagtatctcgaatgagagaaaaaagtgccgaaaacaatgggaaatatgtagcggtgcatctccgttttgaagaggatatggttgcattctcttgttgtgtcttcgacgggggtgaaaaggagaagaaggaactggatgcagccagggagaggggttggagaggaaagtttactaggccaggacgtgtaataaggcctggagcaataaggatgaatgggaaatgtccacttacacctttggaggttgggttaatgcttcgcgggatgggtttcagcaataacaccgcgatctatttggcttctgggaggatatataaatcagagaagaacatggcacctctccttgaaatgtttcctctcttgcagacaaaagaaacattggcatcagatgaagaacttgctccattcaagaatttctcttcaaggatggcagctatcgattacacagtatgtgttcatagtgaagttttcgtgactacccaaggtggaaattttcctcatttccttcttggtcataggagatacatttatggtggtcattcgaagacaattaagcctgataaaagaagattagccatactcttcgatagtccacgtatcggatggaagtcactgaaacgtcagttggtgaatatgagaacacacagcgatgccaagggtattgaaatgaaaagagcaaatgaatctatatacacctttccatgccccgactgcatgtgccgctcaaacaaatcagaacactctaaatccatccaggctagatag

SEQ ID NO: 88 - protein, 334 aa, Oryza sativa
MERFGHNLSNVFNFKIKAWSSIRYYKEAVLPKLIEERLIRISPFANRLSFDAPSAVQRLRCLANFEALKFSKPITTLSDILVSRMREKSAENNGKYVAVHLRFEEDMVAFSCCVFDGGEKEKKELDAARERGWRGKFTRPGRVIRPGAIRMNGKCPLTPLEVGLMLRGMGFSNNTAIYLASGRIYKSEKNMAPLLEMFPLLQTKETLASDEELAPFKNFSSRMAAIDYTVCVHSEVFVTTQGGNFPHFLLGHRRYIYGGHSKTIKPDKRRLAILFDSPRIGWKSLKRQLVNMRTHSDAKGIEMKRANESIYTFPCPDCMCRSNKSEHSKSIQAR

SEQ ID NO: 89 - DNA, 432 bp, Oryza sativa
atgagatatacttacccatggtggaaagagaaggtgattgactcgaatgcaaagaggaaagatgagctctgcccattaacaatggaggaggctgcaatggtattgaaggcactagacattgataggagttatcaaatatacattgccgatggtgaaatatacggtggccaaagaagaatggctgcccttacctcagcttatcccaatgtggtgagaaaagagacattattgccttcagatatctcaggttttttccagaaccattcctcccagatggccctggggtatcaagcccaaagggaggaggttgccccggtacccatgtggcactcccccgaggggggtcgggcccgagaacaacaacaacaaaaacaacaacaacaacaacaacaacaacaacaacaacaactacaacaacaacaacaacaataa

SEQ ID NO: 90 - protein, 143 aa, Oryza sativa
MRYTYPWWKEKVIDSNAKRKDELCPLTMEEAAMVLKALDIDRSYQIYIADGEIYGGQRRMAALTSAYPNVVRKETLLPSDISGFFQNHSSQMALGYQAQREEVAPVPMWHSPEGGRAREQQQQKQQQQQQQQQQQQLQQQQQQ

SEQ ID NO: 91 - DNA, 1722 bp, Oryza sativa
atggctgagctgcggcattcgacggtggcggcggccgcggcccgctcctccaactcccccgcgaagcgcgactccgacgcctctgccgcctcctcccccttcgcctccacctcatccgcgcgcggccgcggcggcggcgacgacgacgacggcaaggatgcgcaccgctcctcccctctcctccctcatcaccacaagcgcctcggcttgccctctcccctccgctcgctcctcgccctcgaggaccccaggtccccctccgcgtcctcctcctaccggatcttgttcgccctcctcgcgttcctcctcctcgccgccaccttctccgcgacctccgtttggtcccgcctcaatgcgccctacttgtgccagaaggatgggatcacgctgcactgccctgagacgaaggaagccccctccctatgggagaatccacgtgctgctaccacgtcctggaaaccctgtgcagagcgccgcagcaatgaaccatcagatgtcccacctgagaatgaaacctctggatatatttttattcatgctgagggtggactgaaccaacagcgtatagctatatgtaacgctgttgcaattgctaagataatgaaggcaacgcttattttgccagttctaaagcaggatcaaatatggaaagaccagacgaagtttgaagatatctttgacgtggatcattttataaactatttgaaggatgatgtgcgcattgtccgagacattcctgactggtttacagaaaaagatgagctctttactagtataaagcgtactgtgaagaacatcccaaagtatgcatctgctcagttttacattgataatgtactcccgaggatcaaagagaaaaagataatgtctattaagccatttgtcgacaggttggggtacgataatgtcccaatggagattaaccggctacgatgcagagttaattatcatgcactaaagttcctgcctgacattgaagaaatggctgataagctggcagcaaggatgaggaaccgaactggcagtgtaaatccgtacatggctcttcatctgagatttgagaaaggaatggtaggcctgtccttttgtgattttgctgggacgcgggaggagaaagagatgatggctgcttataggcagaaagaatggccaaggcgctataagaatgggtctcacctgtggccattagctctgcaaaagagaaaagaaggccgttgccctcttgagcctggcgagatcgctatcatcctccgggcactgggttacacaagaggaacacagatatacgttgcgtcagggcaagtgtatggcggcaaaaacaggatggctcccctccgaaacatgttcccaaatttggtgaccaaggaggagctcgccagcgcggcggagatggcgccgttccggaagcacgtgacgagcctggcggcgctggacttcctggtgtgcctgaggtcggacgcgttcgtcatgacccacggcggcaacttcgccaagctcatcatgggggcccgccgctacgggggccgccaccggctcaagtccatcaagcccgacaagggcctcatgtccaagtccctcggcgacccacacatgggctgggccgccttctccgacgacgtcgtcatcacccaccagaccagggccgggctgcccgagcccactttccccaactacgacctctgggagaatcctctcactccctgcatgtgtcctacagcctga

SEQ ID NO: 92 - protein, 573 aa, Oryza sativa
MAELRHSTVAAAAARSSNSPAKRDSDASAASSPFASTSSARGRGGGDDDDGKDAHRSSPLLPHHHKRLGLPSPLRSLLALEDPRSPSASSSYRILFALLAFLLLAATFSATSVWSRLNAPYLCQKDGITLHCPETKEAPSLWENPRAATTSWKPCAERRSNEPSDVPPENETSGYIFIHAEGGLNQQRIAICNAVAIAKIMKATLILPVLKQDQIWKDQTKFEDIFDVDHFINYLKDDVRIVRDIPDWFTEKDELFTSIKRTVKNIPKYASAQFYIDNVLPRIKEKKIMSIKPFVDRLGYDNVPMEINRLRCRVNYHALKFLPDIEEMADKLAARMRNRTGSVNPYMALHLRFEKGMVGLSFCDFAGTREEKEMMAAYRQKEWPRRYKNGSHLWPLALQKRKEGRCPLEPGEIAIILRALGYTRGTQIYVASGQVYGGKNRMAPLRNMFPNLVTKEELASAAEMAPFRKHVTSLAALDFLVCLRSDAFVMTHGGNFAKLIMGARRYGGRHRLKSIKPDKGLMSKSLGDPHMGWAAFSDDVVITHQTRAGLPEPTFPNYDLWENPLTPCMCPTA

SEQ ID NO: 93 - DNA, 1533 bp, Oryza sativa
atggggtggaaggcgacgatgggtggtgtcaaggtggccggcggtggcggcggcgtggagaaggtcaggtgcccgtcggtggccgcggtggcgcggtcgcggatgaggccgtgggttctgcgcgccaccacgacggtgctgctttggacctgcgtcatgcagctcacggccgtcggggagaggtgggggccgcgcgtcctcaaggggtggccgtcgtgccggacggcgcaggaggcggcctccgccgcgctcgccgccacgcggctcccaatgccggtacccgtcgtggagaaggccccattgccgccgaaaagaatttataggaacaacggttatctgatggtttcatgcaatggtggactcaaccaaatgcgagcagctatatgtgatatggttgtcattgcaagatacttgaatgtgactctaatagtgcccgagttggataagacatcattttggaatgatccaagtgagttccaagatatatttgatgttgaacactttataacatctctgagagatgaggttcgtattcttagagagttgccaccaagggtaaagcgaagagtggaacttggaatgttccactcaatgccacctattagctggtctgatatctcttattaccgtaacaagatacttcctttaattcggaagcacaaggttcttcatctgaacagaactgatgctaggctagcaaataacggactaccgctcgatgtccaaaagttgcgttgccgagttaacttcggttcactgaagttcacttccgatattgaagagttaggcaggagagtgattagattgcttcgccaaaatggcccctttttggtccttcatttacgatatgaaatggatatgctggctttctctggctgtactgaaggctgcactcgtgaagaggcagatgagctcacaagaatgagatatgcttatccatggtggaaagagaaagtaataaactcctatgcaaaaagaaaagatggcctttgccctttgacaccagaggagattgctcttgtcctcagagccttggacattgacagaagtatgcagatatacattgcagctggagaaatatatggtggaaagcgtagaatggctgctcttacttcagcgtatcccaacgtggtgagaaaggagacacttttgcaaccttccgatctcatgttcttccagaaccattcgtcacaaatggcagctctggattacttggtatcactggaaagtgatatatttgttccaacatatgatggtaatatggctaaagttgttgagggacaccgcaggttcatgggttttaagaaaacaatcttattggatcgaaaactcattgttgagctggtcgaccagtataatagtggttctatgctgtgggatgaattctcttcactaatcaagtctgtccacgcaaaccgaatgggagcagcttcaaaaaggacagtgattcatgacaaaccgaaggaagaggactacttctatgctaaccctcaagagtgcttgcgagatcccaatcttttacggacatcatga

SEQ ID NO: 94 - protein, 510 aa, Oryza sativa
MGWKATMGGVKVAGGGGGVEKVRCPSVAAVARSRMRPWVLRATTTVLLWTCVMQLTAVGERWGPRVLKGWPSCRTAQEAASAALAATRLPMPVPVVEKAPLPPKRIYRNNGYLMVSCNGGLNQMRAAICDMVVIARYLNVTLIVPELDKTSFWNDPSEFQDIFDVEHFITSLRDEVRILRELPPRVKRRVELGMFHSMPPISWSDISYYRNKILPLIRKHKVLHLNRTDARLANNGLPLDVQKLRCRVNFGSLKFTSDIEELGRRVIRLLRQNGPFLVLHLRYEMDMLAFSGCTEGCTREEADELTRMRYAYPWWKEKVINSYAKRKDGLCPLTPEEIALVLRALDIDRSMQIYIAAGEIYGGKRRMAALTSAYPNVVRKETLLQPSDLMFFQNHSSQMAALDYLVSLESDIFVPTYDGNMAKVVEGHRRFMGFKKTILLDRKLIVELVDQYNSGSMLWDEFSSLIKSVHANRMGAASKRTVIHDKPKEEDYFYANPQECLRDPNLLRTS

SEQ ID NO: 95 - DNA, 1401 bp, Oryza sativa
atggcgaggtcgaggcctagggtttggctcctggcggggtgcagcgccgtgctgctgtgggccttcgtcgggcagctcgtggccgtcggacgcctcctcgccttgttcggcctcgccggcgacgcggagccctcgcctccgcccaccgcgcttccgcctcgaagagtctataagagtaatggttatctgaaggtatcttgcaatgggggtttgaatcagatgcgttcagagatatgtgacatggtggcggttgctcgcttgctaaaccttacaatggttgtcccagaactagacaagaggtcattctgggctgatcaaagcaattttgaagatatatttgatgttaaacatttcattgacacattaagagatgaagtgcacattgttaaacagcttccgaagaggtttggtccagaggattcaaacaatatacttaatatgccacctgtgagctggtctgatgaaaaatattacttgcatcagatcttaccattattcagcaaatatagcgtcatccattttaacaagacggatgctcggttagcaaacaatggtatcagtacacagcttcaactacttaggtgccgtgttaattttcatgcactgaagttcacccctcaaattgaggccttggggaataaactggtgcagaaacttcaggccaagggatcatttgcagccttgcatttacgctatgagatggacatgctggccttttctggttgcaatcatggtctttctcaagaagaagctgaagagctcaaaagaatgagatatgcttatccatggtggagagaaaaggaaattgattcacaagctaagagattgcaagggctatgcccacttacacctgaggagacatcttttattctgaaagctctgggatttcagaaggacactctcatatacattgctgccggtgaaatttatgggggagaaaaaagattagaaccattacaagctgcatttccaaaacttgtaagaaaggagacgctgctagacttggaagctctacgacaattccagaaccattcttctcagatggctgcacttgacttcattgtatccacagccagtgatattttcattcctacttatgatggtaacatggcaaaacttgttgaaggtcaccggaggttcctgggtttcaggagaagtgtgctactagaccgacagaaattggttggatttatagatctgtacaacaataagacaatctcttggaacaattttgcatcttctgtccaggaaactcatagaaatcgtgtagttcaaccgtcctgtcggcagaaacttgaaaataagccaaaagaagaggattacttttatgctaacccacacgaatgcctggccaattcaagattttgcagccgaaccaaggatgcaatcagtgtaaggtga

SEQ ID NO: 96 - protein, 466 aa, Oryza sativa
MARSRPRVWLLAGCSAVLLWAFVGQLVAVGRLLALFGLAGDAEPSPPPTALPPRRVYKSNGYLKVSCNGGLNQMRSEICDMVAVARLLNLTMVVPELDKRSFWADQSNFEDIFDVKHFIDTLRDEVHIVKQLPKRFGPEDSNNILNMPPVSWSDEKYYLHQILPLFSKYSVIHFNKTDARLANNGISTQLQLLRCRVNFHALKFTPQIEALGNKLVQKLQAKGSFAALHLRYEMDMLAFSGCNHGLSQEEAEELKRMRYAYPWWREKEIDSQAKRLQGLCPLTPEETSFILKALGFQKDTLIYIAAGEIYGGEKRLEPLQAAFPKLVRKETLLDLEALRQFQNHSSQMAALDFIVSTASDIFIPTYDGNMAKLVEGHRRFLGFRRSVLLDRQKLVGFIDLYNNKTISWNNFASSVQETHRNRVVQPSCRQKLENKPKEEDYFYANPHECLANSRFCSRTKDAISVR

SEQ ID NO: 97 - DNA, 1497 bp, Oryza sativa
atggccaggcacaagagctcgccgccggcgatccgccgccgcggggtcggcatgctccggtgggcggtgcgcgtcgcctcgagcatcgtgctctggacggccctcctccatttatccagcctcctcggcctcccccgcccgccgctcctcgccgcccggccctcctgcctaggcggcggcggcggcagcaactccagcgcctcctctgctgtaaccgtcgctgccgccgacgaggtcgggcgcctcgcgcccccggctgtgcctcgcaggagggtttataagagtaatggttatcttcttatttcatgcaatggtggtctgaaccaaatgcgagctgcgatatgtgacatggtaactgtagcacgctatatgaacctgactatggtggtacctgaacttgataagcagtccttctgggctgatcctagtgattttggagatatttttgatgtaaaccacttcatcaattctttacaagatgaagtaaagatcatcagggaactgccacagaaattcagcaggaaagttccattctcaatgcagccaatcagctggtctagcgagaagtactatttgagacagatcttgcctctagtacggaagcataaggtggtacgttttagcaggacagattctcgccttgcaaataatggccttcctttaaagctccaaaagcttcgttgccgtgttaactacaatgcactacaatttgcaccatcaattgaggctcttggcaaaaagatgatatcagctcttaggaaaactggatcttttattgtgcttcatctgagatacgagatggatatgcttgcattctctggttgtacacatggatgttctgacgaagaaacagcagagctcacgagaatgaggtatgcgtacccttggtggaaagaaaaagaaatagattctgaaaagaaaaggctcgaaggattatgccccctaacacccggagaaacaacattagtactcaaagctcttggtttccccagggacactcggatatatattgcctcgggtgaaatctatggtggtgaaaaaagattaactgaactgaagacagaattccctaacattattcggaaggagatgcttttatctgctgatgagttacgccccttccagaagcattcgactcaaatggcagccctggactatcttgtgtctattgctagtgatgtttttatccccagtaatgacggaaacatggctaaggttgtagaaggacatcgcaggtttatgggctttcacaaaaccatacagcttgataggaaaaagctagttgagcttatagatcttcttgaagatcaggagctgtcctgggacgaattctctactgctgtgaaggagctacacgagggccgaatgagcgaacccaccagaaggaaagctattgccgggcagccaaaggaagaggactacttctatgctaatccacatgaatgtcttggagctgcgagaaagcgaagggagaagctaaaacatactgagatatga

SEQ ID NO: 98 - protein, 498 aa, Oryza sativa
MARHKSSPPAIRRRGVGMLRWAVRVASSIVLWTALLHLSSLLGLPRPPLLAARPSCLGGGGGSNSSASSAVTVAAADEVGRLAPPAVPRRRVYKSNGYLLISCNGGLNQMRAAICDMVTVARYMNLTMVVPELDKQSFWADPSDFGDIFDVNHFINSLQDEVKIIRELPQKFSRKVPFSMQPISWSSEKYYLRQILPLVRKHKVVRFSRTDSRLANNGLPLKLQKLRCRVNYNALQFAPSIEALGKKMISALRKTGSFIVLHLRYEMDMLAFSGCTHGCSDEETAELTRMRYAYPWWKEKEIDSEKKRLEGLCPLTPGETTLVLKALGFPRDTRIYIASGEIYGGEKRLTELKTEFPNIIRKEMLLSADELRPFQKHSTQMAALDYLVSIASDVFIPSNDGNMAKVVEGHRRFMGFHKTIQLDRKKLVELIDLLEDQELSWDEFSTAVKELHEGRMSEPTRRKAIAGQPKEEDYFYANPHECLGAARKRREKLKHTEI

SEQ ID NO: 99 - DNA, 1626 bp, Oryza sativa
atgtcgtcgtcggcgtcgccggcggcgtggtgggcgcgcagccgcgtccgcatcctcctaccggtcatcttcctcgcccccgcgctctacttcctcctctctccaccctcctctccgcctttcttcttcactcttcccacctccagggaggagtcgccgtcggcgtcggggtcgcgggtcatatgggcgcagcggcgggtggcggagtggcggtcgtgcgggtggtggcgggcggcaatgccggctccgtcgaggaggaatgggtacatccggatcgactgctacggcgggctcaaccagctgcgacgcgatctatgtgatggaattgcggttgcgcgccttctcaacgcaacaatggttctgcccaagtttgaggttgctgcctactggaatgaatctagtggatttgcagacgttttcgatgttgattacttcattgagcaaaccagaggttatgtggaagttgtgaaggacatgcctgaagagatagcatcaaaagagccctttaaggttgattgcagcaaacgaaaaggacattttgattacgtggaaacggtgcttccagctctcttggagcatcagtatatttcactgacacctgccatgagccaaagaagagacagtgcaattgaagctgcacgtggggaggacaggaaggcattgactgcgatcaagggtaccagggtggatcgcctacgagaagctagtgacacagggcatcatcgtggtcggcacaagagggcccgctcctctcctccacgccatgacgacgagccgccaccgccgccgccgctgtctccggcggtgacaggaggagcacacggcggcgccgcgtggcactcaacggtgctcgcggaggacgtcgaaagtgccgtcatcgtcgcggcgctgacgcacgtcatcagctccacggcggcggaggtgaccacggccgttcctccggtgacggttgcgccgcagcgagctgccacggctaccatgttcggacagcaagtgatgcagcagccgccgcgcggctttcctcctctgccgtcgtcgagcggatcagcagcgacggcgccggagcagcagcagccacggcggcgctaccgcggcgtgcggcagcggccgtgggggaagtgggcggcggagatccgcgacccggtgaaggcggcgcgggtgtggctcggcaccttcgacaccgccgaggacgccgcccgcgcctacgacgccgccgccgtccgcttcaagggctccaaggccaaggtcaacttccccgacgaagtcgccggcgccagcatcgccgccgtccagctgccacgccatcatcaacaccaccccccaacgtcactgccgccgctgccggtgccggcgcatctgaggccacacttcagcctcgccggcggccagagcaccacaccggcgcccgcagccgccgccgtcgccgctccgccgcgggaggagttccccgacctcagcagctacgcgcacatactgcagagcggcgacctggagtacgacttccacgccgcggtttctgccggactaacgacgacagctgggcgatcgtcgtcgtcgtcgtcattgtcgatgccgccgccatccgaggatcttgactataagcctccctttggaccatctaattaa

SEQ ID NO: 100 - protein, 541 aa, Oryza sativa
MSSSASPAAWWARSRVRILLPVIFLAPALYFLLSPPSSPPFFFTLPTSREESPSASGSRVIWAQRRVAEWRSCGWWRAAMPAPSRRNGYIRIDCYGGLNQLRRDLCDGIAVARLLNATMVLPKFEVAAYWNESSGFADVFDVDYFIEQTRGYVEVVKDMPEEIASKEPFKVDCSKRKGHFDYVETVLPALLEHQYISLTPAMSQRRDSAIEAARGEDRKALTAIKGTRVDRLREASDTGHHRGRHKRARSSPPRHDDEPPPPPPLSPAVTGGAHGGAAWHSTVLAEDVESAVIVAALTHVISSTAAEVTTAVPPVTVAPQRAATATMFGQQVMQQPPRGFPPLPSSSGSAATAPEQQQPRRRYRGVRQRPWGKWAAEIRDPVKAARVWLGTFDTAEDAARAYDAAAVRFKGSKAKVNFPDEVAGASIAAVQLPRHHQHHPPTSLPPLPVPAHLRPHFSLAGGQSTTPAPAAAAVAAPPREEFPDLSSYAHILQSGDLEYDFHAAVSAGLTTTAGRSSSSSSLSMPPPSEDLDYKPPFGPSN

SEQ ID NO: 101 - DNA, 1539 bp, Oryza sativa
atgcggaggccgtcgccttcgccgccggcggcgaggggcccggcgctcgccgctgcggcggccgtcgtcgtgctacttccgtccatcttccccgcgatcttcaccccgcttggccgcgccttcccttccctcttctcggagtggaatgcccctaagccaatgcatgagtctcttctgaatgaggctttgcggcgaacaatttcaaacgaacaaaagagagagctgtggtcaccattgccgtaccaaggttggaaaccatgcttgaagtcatcaagtgttcacggggtacctttggaacccactggatatatccaagtatttcttgatggtggactgaatcagcaaagaatggggatatgtgatgcggttgctgttgctaaaattctgaatgcgtctcttgtgatcccacatcttgaagtaaatcctgtttggaaagacacaagctcctttgaagaaatttttgatgtggatcattttatcaacaccttaaaagctgaagtttcaatagtcaaagttctcccaaaaaaattttcctggagcacaagagagtactatggtacaggcatccgtgctacaagaataaaaaccgcacctgttcatgcctctgcaagttggtatctggagaatgtcagtcctatccttcaaagctatggcattgctgccattgcccccttttctcaccgtcttgcatttgatgacttgcctgtggacattcagcatctgcgttgcaaagttaacttccaagctcttgttttcctgcctcacattatctcactgggggagactcttgtgaaacgcttgagatctcccgtccagggccaatctggtgaacttatccaagaagttggagaagacacaaaccaagccggaaaatatgcagttttgcatctccgttttgataaggatatggctgcacattctgcttgtgacttcggtggtggcagagctgagagattagctctggctaagtacagacaagtcatctggcaagggagggtattaaattcacagctaactgatgaggagcttcggaacttgggacgctgcccattgactccagaagaaattgggctgttactggcagctcttggatttgacagcagaactcgaatctatctagcctctcacaaggtatacggcggggaagccagaatttctagcctgcgcaaacttttccccctaatggaggacaagaggagccttgcgtcggaagaggagctgactaatgttgaaggcaaggcttctgttctagcagctcttgactactatatcagcatgcacagcgacattttcatctctgcatctcctgggaatatgcacaacgcactgatggctcaccgtacctttgagaatatgaagaccataaggccaaacatggcattgcttgggcgcatctttgttaacaagagcatggagtggttggaatttcaggaggctgtacaagcagggcacaagggtagatacgggcaaatcagactgaggaaaccaaagcaatctatttatacttaccctgctccagactgtatgtgtcaagggtag

SEQ ID NO: 102 - protein, 512 aa, Oryza sativa
MRRPSPSPPAARGPALAAAAAVVVLLPSIFPAIFTPLGRAFPSLFSEWNAPKPMHESLLNEALRRTISNEQKRELWSPLPYQGWKPCLKSSSVHGVPLEPTGYIQVFLDGGLNQQRMGICDAVAVAKILNASLVIPHLEVNPVWKDTSSFEEIFDVDHFINTLKAEVSIVKVLPKKFSWSTREYYGTGIRATRIKTAPVHASASWYLENVSPILQSYGIAAIAPFSHRLAFDDLPVDIQHLRCKVNFQALVFLPHIISLGETLVKRLRSPVQGQSGELIQEVGEDTNQAGKYAVLHLRFDKDMAAHSACDFGGGRAERLALAKYRQVIWQGRVLNSQLTDEELRNLGRCPLTPEEIGLLLAALGFDSRTRIYLASHKVYGGEARISSLRKLFPLMEDKRSLASEEELTNVEGKASVLAALDYYISMHSDIFISASPGNMHNALMAHRTFENMKTIRPNMALLGRIFVNKSMEWLEFQEAVQAGHKGRYGQIRLRKPKQSIYTYPAPDCMCQG

SEQ ID NO: 103 - DNA, 1917 bp, Oryza sativa
atgggctaccaccagcccgtacacggcggcgccgcggccggtgccggcgggagtggcggcggtggcggcggcgaccacctgcatcagcatcaccacccgcggttgcacagcccgcggatatccgggggcgggtcgatgacccggcgtgccaactcgttcaagcgcggggagatcgagctccagatcggctcgccgcgctcgccccgcggcgacggcgtcgggagccccctcgccgagtcgtcgtcggcgtccgaggcgtccgcgggcggcggcggcgcggtccaccaccaccaccaccagagccagcagcagcagctccggttccgcctcttcaagcggccggggtccggcgccggggaggtcgtgctcgggctggggatccgggagaggaggcggattgggaacctgctgttcctcgcgttctgcggcgtgtgcctgctcctcggcgtcgccaagatctgggcgggcggctggttcgccctccccggcgacgacaaggacgctgatttgcaggatctctcaatctcattctccagtgatggagggtatcaatttgatagccactttggacatgttggagggaaagagagtgacaggatgttgatgacagtgggatcagaagacagtgttcctgaggcccccgatgtctggtcccagccaagcagcggaaagttcagacaatgcattatttcgaattctcataaaaaggaagattctcacacaaatggatacattctcattaacgcaaatggaggtttgaatcaaatgcggtttgggatatgcgatatggttgctgttgctaagatcctgaaggctacattggttctaccttcacttgatcatacatctttctgggcagatgacagtgaatttaaggaccttttcaattggagacacttcattgagtcactcaaagaagacattgatattgttgaaatgctgcccccagcatacaagcatattgagcctgtggctaaagctccaatatcttggtcaaaggtgaattattatagagatgaaattctccctcttttgaaaaaacacaaagtcatttactttacgcatacagattctcgccttgccaacaatggtcttcctagttatattcagaaattaagatgccgagttaactataggtctttgaagtattcccaaacaattgaagatcttggtgctaccttggtttcacggatgcatcaggatggaagcccatatcttgctctccatctaaggtttgagaaggatatgctagcttttactggttgcagccatagcctgacatcagaagaagaagaagaattgcgtaaaatgcgttatgaggttagtcattggaaagagaaagaaataaatggaactgagagaagaagtatgggtggttgtcctttgactcccagggaaacttcgtttttactcaaaggattgggtttcacacgaagcaccagaatctacttggttgcaggtgaagcttttggcaatggaagcatgcaggcgctgatggatgattttcccaatatatattctcattctacccttgcaacaaaagaggaacttgagccctttagaaatcaccaaaatatgcttgctggtcttgactacattgtagctctccagagtgatgtctttctttacacgtatgatggtaatatggccaaagctgtacaaggtcataggcgtttcgagaacttcaggaagacgatcaacccggataggatgagtttcgtgaacctgatagatgaatatgatgaaggaaggatgtcttgggatgacttcagctcagaagtgaaacgtatacatagagatggagagcgaataggggctccatatctcagggagcctggggaattccccaagctagaagagtctttctttgcaaatccgttgccgggctgtatatgtgagaagcttaatgacgagtga

SEQ ID NO: 104 - protein, 638 aa, Oryza sativa
MGYHQPVHGGAAAGAGGSGGGGGGDHLHQHHHPRLHSPRISGGGSMTRRANSFKRGEIELQIGSPRSPRGDGVGSPLAESSSASEASAGGGGAVHHHHHQSQQQQLRFRLFKRPGSGAGEVVLGLGIRERRRIGNLLFLAFCGVCLLLGVAKIWAGGWFALPGDDKDADLQDLSISFSSDGGYQFDSHFGHVGGKESDRMLMTVGSEDSVPEAPDVWSQPSSGKFRQCIISNSHKKEDSHTNGYILINANGGLNQMRFGICDMVAVAKILKATLVLPSLDHTSFWADDSEFKDLFNWRHFIESLKEDIDIVEMLPPAYKHIEPVAKAPISWSKVNYYRDEILPLLKKHKVIYFTHTDSRLANNGLPSYIQKLRCRVNYRSLKYSQTIEDLGATLVSRMHQDGSPYLALHLRFEKDMLAFTGCSHSLTSEEEEELRKMRYEVSHWKEKEINGTERRSMGGCPLTPRETSFLLKGLGFTRSTRIYLVAGEAFGNGSMQALMDDFPNIYSHSTLATKEELEPFRNHQNMLAGLDYIVALQSDVFLYTYDGNMAKAVQGHRRFENFRKTINPDRMSFVNLIDEYDEGRMSWDDFSSEVKRIHRDGERIGAPYLREPGEFPKLEESFFANPLPGCICEKLNDE

SEQ ID NO: 105 - DNA, 1539 bp, Oryza sativa
atgcgcaggggcggggtgaaggcggcggcggcggccgagaaggcgcgggaggcggcgcgggcgaaggtgtgggcggcgcgggcgagcaccaccgtggtgctctggctgtgctgcgcgctgctgctcgcgacgtcgcgggagctcgggaggtggtcgggctgcctcacccagccgctgatcgtcgtagagcgccggttcgaggcggttgccgccgcgggcagcgagagggcggctgcatcagcatcggcagcggcagcggcgcgcggcgagagggcagaatcatcagcatcggaagcggcggtggcggcgctcccgccgaagagaatctacaagaacaatggctatctgatggtctcctgcaacggtgggcttaaccagatgcgagcagctatatgtgatatggtgacgattgcaagatacctgaacgtcacccttatcgtcccagaactggacaaaacttcattttgggctgatcctagtgagttcaaggatatatttgatgtggattacttcatatcatcattgagagacgaggttcggatactgaaagagctgcctccaaggctgaaaagaagagttgaactgggatatgttcgctcgatgccacctgtcagttggtctgatatatcttattaccaaaatcagattctaccactgattaggaagtacaagatcgttcatctgaacaaaactgatgctcgccttgcaaataatggcctacctatggagattcagaaattgaggtgccgtgtcaattttgctgcattgagatttacccctgagatagaagagctgggtaggcgtgtggttcgaattcttcgtcgtaatggcccttttctggttcttcacttgcgatatgaaatggacatgctcgcgttctctggttgcacacatggttgcagcaacgaggaggctgaggagctcacaagaatgagatatgcttacccatggtggaaagagaaggtgattgactcaaatgcaaagaggaacgacgggctctgtccattaacaccggaggagactgcaatggtattaaaggcactagacattgatagcagttatcaaatatacattgccgctggtgaaatatacggtgggcaaagaagaatgtctgcccttacctcagcttatcccaatgtggtgagaaaagagacattattgccttcagatctcaggtttttccagaaccattcctcccagatggcagcattagattacattgtatccttggagagtgatatttttatccccacttatgatggtaatatggcaaaagttgttgaaggtcatcgcagatacttgggcttcaagaagactgtactgctagataggaagcttatagttgagctcgttgatcagtacaaaaacggcacaatgagatggaaccatttctcctccgctgtgaaggcgtcgcatagcagccgcatgggcgcgccatcaaggaggcagatgattcctgacaaacctaaggaagaagactacttctatgcaaatcctcatgagtgtttgcaccaaccagaagagctatcagttttgtga

SEQ ID NO: 106 - protein, 512 aa, Oryza sativa
MRRGGVKAAAAAEKAREAARAKVWAARASTTVVLWLCCALLLATSRELGRWSGCLTQPLIVVERRFEAVAAAGSERAAASASAAAAARGERAESSASEAAVAALPPKRIYKNNGYLMVSCNGGLNQMRAAICDMVTIARYLNVTLIVPELDKTSFWADPSEFKDIFDVDYFISSLRDEVRILKELPPRLKRRVELGYVRSMPPVSWSDISYYQNQILPLIRKYKIVHLNKTDARLANNGLPMEIQKLRCRVNFAALRFTPEIEELGRRVVRILRRNGPFLVLHLRYEMDMLAFSGCTHGCSNEEAEELTRMRYAYPWWKEKVIDSNAKRNDGLCPLTPEETAMVLKALDIDSSYQIYIAAGEIYGGQRRMSALTSAYPNVVRKETLLPSDLRFFQNHSSQMAALDYIVSLESDIFIPTYDGNMAKVVEGHRRYLGFKKTVLLDRKLIVELVDQYKNGTMRWNHFSSAVKASHSSRMGAPSRRQMIPDKPKEEDYFYANPHECLHQPEELSVL

SEQ ID NO: 107 - DNA, 2880 bp, Oryza sativa
atggcgtctccgcctaccagcgagtccgcgatcacgtcggccggcagcgccagcgccagcgggttcgactgcctccccgatgatctcgtacaccatgtcctctcgttcttgcccgcgccagacgccgcctgcaccagccttctgtcgcggcggtggcgcaacctctgggtctccatgccctgccttgacatcgacgtaagtgacttccacgacgcctcccagttcgacaggttcatggaccacgtgttgcatctcttggacgacagcgtgcccctgcgctcttttcgccttcgttcttgctggattgacgattctgcagtctcgtggctcagatatgctgtcaaacgcaaggtccctgttcttgaatacgctgagcgtcagggatatttcatccatggttgccatgatctcatctcggcttcttcgtatctgactaaggtggtgctcgaacatgttgtgttacatgattgtcactttgggccattaaacaacgggtgccccgccctggaaaacctggagcttttggaagttaatatccagttcacagagatctcgtcaacttcactcaagcatctgcggatcgtcaactgtatgatggactgtaaattttggatccgtactccaaatcttctgacaatgtgccttgatggcgtagaatgcaagagctcactatactggaccgtacttaacaacaggagtctttttaccgtccttgaggactggcggtaccaaatcccagccgtccattccgggagatctaacggccaggatgcctcggtaccgcgcgattatgaagatgaggacttaagcgaagatgaagatgaggacttaagcgatgggcatcatattgagtataatatccttggtgtcctttcacatgctagaagcctaaaattggtagctccgctacgagaggctttgttcgaggggtgcttattgacatgcccggtcttcaacaacttgaaatgtttggtatttggtgactggtgcatggattttgacctttatccactacgctgtgttcttaagcaatcaccaatattagaggagctctgtgtggaacttcgtgagaaagagtgcgagtattgcaaggaaaaagcaccacctttctcgtactcgtatggggaaatattgccatttaagtgtcatcgccttaagactgtcaaaatcaaatgtggagaacgtgatgaaagatttatcgctttggtgaaactgtttttcaagatctcagtctgtattgagaaatttgacttagataggtggtttatagcatttgtcactgtgtcaagtagcagtagtgaagagaggaatgaaagggttgcaccaattgacctatggggttcaaagctcgctagcaacttctttggctgcagtaactctagcggaaaattccttgattccagtgttaccacacagccggatcgatatttgattattgttacaagtggaggtctcaatcagcagagaacagggatagttgatgctgttgtcgctgcacgcattttaaatgcaacgcttgttgttcccgaattggatcaaagatctttctggaaagattcaagcaacttttctgaaatatttgatatcaactggttcatctcatttcttgcaaaggatgtcaatattatcaaagaacctccagaaaaagggggtaaagctgtgaaaccttataaaatgcgcgtccctcgaaaatgcactccaaaatgttacttaaaccgtgtattacctgcactcctgaagaaacatctctttttgtggttgaagttcagaaaaatcctcagccatatagctcataccactttctcgctggttattcaggtcattcgcctgactaaatatgattacaggctctcaaataagctggacaaggacctgcaaaaactgcgttgccgagtcaactatcatgctttgagatttactgacccaatacaagaattgggtgaaaagttaataaaacgaatgcgagagaagagcagacattttattgctctgcacctgaggtttgaacctgacatgcttgccttttctgggtgttattatggtggtggagaaaaggagaaaagagaactaggctccattcgcaagcgatggaaaactttgcatataggcgacccagagaaaggaaggaggcaaggtcgatgcccactaacccctgaggaggtagggctaatgttgagggcattaggctacaaaagtgatgtccatatctatgttgcttccggtgagatatatggaggggaagacactttagcacccctcaaattgctcttccccaattaccataccaaagaaacattatccacagaagaggaattgactccattcttggcacactcatctcgcatggcggcaattgattttattgtttgtgatggaagtgatgcttttgtaactaacaacaacggtaacatggccaaaattcttgttgggcgaaggagatattttggccacaagagaacaatcaggccaagtgctaaacagctctatcccttatttatgaataggtcaaatatttcatgggatgcattctcctcacaggtacaaacaatacagaaaggattcattggagagcccatggaaattacgcctggaagaggtgaattccatgccaaccctgctgcctgtatatgcgaaaagaccggcataaagtctgtagtcggatcggattccagaagtaaccgagaaactgttaacagcactgaaataagtaacaaacctattggtgggccaacatatcctatctataccgatgaagaggcggatcgacctgatactgaagatgatccttcagggataggagaaatgattgacatggaagctgaagatgattcattggccagcagagtagattctgtgctggaggaaatcctttcggattaa

SEQ ID NO: 108 - protein, 959 aa, Oryza sativa
MASPPTSESAITSAGSASASGFDCLPDDLVHHVLSFLPAPDAACTSLLSRRWRNLWVSMPCLDIDVSDFHDASQFDRFMDHVLHLLDDSVPLRSFRLRSCWIDDSAVSWLRYAVKRKVPVLEYAERQGYFIHGCHDLISASSYLTKVVLEHVVLHDCHFGPLNNGCPALENLELLEVNIQFTEISSTSLKHLRIVNCMMDCKFWIRTPNLLTMCLDGVECKSSLYWTVLNNRSLFTVLEDWRYQIPAVHSGRSNGQDASVPRDYEDEDLSEDEDEDLSDGHHIEYNILGVLSHARSLKLVAPLREALFEGCLLTCPVFNNLKCLVFGDWCMDFDLYPLRCVLKQSPILEELCVELREKECEYCKEKAPPFSYSYGEILPFKCHRLKTVKIKCGERDERFIALVKLFFKISVCIEKFDLDRWFIAFVTVSSSSSEERNERVAPIDLWGSKLASNFFGCSNSSGKFLDSSVTTQPDRYLIIVTSGGLNQQRTGIVDAVVAARILNATLVVPELDQRSFWKDSSNFSEIFDINWFISFLAKDVNIIKEPPEKGGKAVKPYKMRVPRKCTPKCYLNRVLPALLKKHLFLWLKFRKILSHIAHTTFSLVIQVIRLTKYDYRLSNKLDKDLQKLRCRVNYHALRFTDPIQELGEKLIKRMREKSRHFIALHLRFEPDMLAFSGCYYGGGEKEKRELGSIRKRWKTLHIGDPEKGRRQGRCPLTPEEVGLMLRALGYKSDVHIYVASGEIYGGEDTLAPLKLLFPNYHTKETLSTEEELTPFLAHSSRMAAIDFIVCDGSDAFVTNNNGNMAKILVGRRRYFGHKRTIRPSAKQLYPLFMNRSNISWDAFSSQVQTIQKGFIGEPMEITPGRGEFHANPAACICEKTGIKSVVGSDSRSNRETVNSTEISNKPIGGPTYPIYTDEEADRPDTEDDPSGIGEMIDMEAEDDSLASRVDSVLEEILSD

SEQ ID NO: 109 - DNA, 1236 bp, Oryza sativa
atgccggtggtggtggtggtggtggtagtggccgtgatgcgcggcgacggcggcgggttgaagggcgcgagggggaggcaggggcgcggcgccgcggtggcggggcggtggcggcgggtggccgtgatcctcctcgcgctggcgtacgcggcgtcgatgctcgtggtcttcctgggcggcggcgccggcggcgtggcggtggcgggcgcgggcgcgggcgcgctgcggcagcgtggggcgccggcgccggccgggtcggtgtaccgcagccacctcgtgttggaccgcctcctgccggagctgcgcgcctcctccgcctcccgcccgcacccgctaatgacaccacaaaacaaaaaatctggaaaacgatgggctccttgtatcaccaagaagttgagacgatcagagttaccaccttcaaatggttttctcataatcgaagcaaatggtggtctgaatcaacaacgcatttctatctgcgatgctgttgctgtggcaagcttactcaatgcaactcttgtcaccccagcttttcatttgaacagcgtgtggcgtgattctagcaaatttggtgatatctttgatgaagatcactttattgggtcgctcagaaaatacataagggttgtcaaaaaacttcctgaagatgcatttgtgaattttgatcacaatatcagcatgataccaaatatgaggaccaaagccttctcatctgaaagctactacctacaaaagggctgtgcgtattgctcctttctcaaacagattggcccattcggttccaccgaatatccaggcgttgaggatatgctagccttttcgtgctgcatatatgatggtggctggagggagagtattgaaatggaaaatgctcgtgaaaggagttggagagggaagtttcaccgacctggtcgagtgataaatcctgaggcaaataggaggaatgggaagtgccctttaactcctttagaggttggaatgatgctgcagggcatgggatttggcaatactacctccctctatgttgcctctggtaaaatatacaacgctgaaaagtatatgactcctcttcgccagttgtttccacttttacagacaaaagatactctcgcttcacctgaggaacttgcacagttcaaggatcagacaacaattggattagaaaccatttttatctccatgcgacttccttcaactcagacacctacctatgctctatcaggggcactcatctag

SEQ ID NO: 110 - protein, 411 aa, Oryza sativa
MPVVVVVVVVAVMRGDGGGLKGARGRQGRGAAVAGRWRRVAVILLALAYAASMLVVFLGGGAGGVAVAGAGAGALRQRGAPAPAGSVYRSHLVLDRLLPELRASSASRPHPLMTPQNKKSGKRWAPCITKKLRRSELPPSNGFLIIEANGGLNQQRISICDAVAVASLLNATLVTPAFHLNSVWRDSSKFGDIFDEDHFIGSLRKYIRVVKKLPEDAFVNFDHNISMIPNMRTKAFSSESYYLQKGCAYCSFLKQIGPFGSTEYPGVEDMLAFSCCIYDGGWRESIEMENARERSWRGKFHRPGRVINPEANRRNGKCPLTPLEVGMMLQGMGFGNTTSLYVASGKIYNAEKYMTPLRQLFPLLQTKDTLASPEELAQFKDQTTIGLETIFISMRLPSTQTPTYALSGALI

SEQ ID NO: 111 - DNA, 1590 bp, Oryza sativa
atgcgcaggggcggccacgccgaggcgttgctgctgcggcggcggcgcgggccggcgaggctgtgggtcgcggtgctggcgctgctcgccggcaccctctggctcttctcctcctcctcctccgctggcctcggcctcggcctcgcccgctcctcctacggactccaggatgttgatgtaaataagttgtggagaactgcagattcaaatggttggagggcatcttctgcaccgcgcacctattggcctcctccaccaatagagtctgagtcaaatggttacttacgtgtccggtgcaatggtggcttgaaccaacaacgtagtgcgatatgtaatgctgttgttgctgcacgaataatgaatgctacactagtgctgccagagctggacacaaattctttctggcatgatgagagtggttttttaggtatttatgatgtgctccacttcatcaagacattaaagtatgatgttcgaattgctatggtcattccagaaattactacaaatggaaagaccaagaagctgaaagcccatcagattcgaccgcctcgagatgcaccagttacgtggtatacaacagttgctttggagaagatgaagaagtatggagctatatatttaaccccattttcacaccgcctggcagaagacattgatgatccagagctccagagattgagatgcagggtgaattaccatgcactacgattcaagcctcacataatgaaaacaagcagtgagatagtcaataagctccgtacagaaggccatttcatgtcaattcaccttcgatttgagatggatatgcttgcatttgctgggtgcattgatatattcacacctcaagaacagaaaattctgatcaagtaccgcaaggaacattttgcagaaaaggaacttatttatagggaaagaaggctcatcgggaagtgccctttaactccagaagaggtaggtcttattcttcgatccatgggatttgacaataaaacaagaatctaccttgcttctggcgatctctttggtgggaaacgattcatgaagccatttaaggctatgtttccacgcttagaaaaccacagcactgttggtcctggaaagctggaagaaaatacaagagggctcgcgggttctgcagtggattacatggtctgtctcctgtcagacatttttattcctacatatgatggcccgagcaactttgcaaacaacctaatgggccaccgcctatactatggtttccggacaacaatcacaccaaacaggaaggccctagctcccatattcatggacagggaggaaggtcgcgccgctcgctttgaggagcgagtcaggcaggttatgttcaacacatattttggtggcccccacaagcgtgtccatccagaatctttctacacaaactcatggcctgagtgcttctgccaaccgaatccaaggaaccgtgcagacaaatgccctccggacaacatatatgaggttctggagagccaatttcagagtgtagagggtgaagaagatatcgaagaagtgaaatccactaatcagactgactcaacgagccaaatagaagaattagtggtctaa

SEQ ID NO: 112 - protein, 529 aa, Oryza sativa
MRRGGHAEALLLRRRRGPARLWVAVLALLAGTLWLFSSSSSAGLGLGLARSSYGLQDVDVNKLWRTADSNGWRASSAPRTYWPPPPIESESNGYLRVRCNGGLNQQRSAICNAVVAARIMNATLVLPELDTNSFWHDESGFLGIYDVLHFIKTLKYDVRIAMVIPEITTNGKTKKLKAHQIRPPRDAPVTWYTTVALEKMKKYGAIYLTPFSHRLAEDIDDPELQRLRCRVNYHALRFKPHIMKTSSEIVNKLRTEGHFMSIHLRFEMDMLAFAGCIDIFTPQEQKILIKYRKEHFAEKELIYRERRLIGKCPLTPEEVGLILRSMGFDNKTRIYLASGDLFGGKRFMKPFKAMFPRLENHSTVGPGKLEENTRGLAGSAVDYMVCLLSDIFIPTYDGPSNFANNLMGHRLYYGFRTTITPNRKALAPIFMDREEGRAARFEERVRQVMFNTYFGGPHKRVHPESFYTNSWPECFCQPNPRNRADKCPPDNIYEVLESQFQSVEGEEDIEEVKSTNQTDSTSQIEELVV

SEQ ID NO: 113 - DNA, 1689 bp, Oryza sativa
atgtcggtggcgctgtacgcgcgtgggggtggctgcggcgcgaaggcggccgcagcgcggcgctcggggcgcggcggtggtgggcggaggcgcgccgcggtcgtgctgctgctcgcgctggcgtacgtggcggggctgctcgtgttcgtgcttgcgggaggcggtggtgttggagttggagggcgcgtggaggtggggcgagaggtgggggtgatgacggtggcctcgctccggaggcggcgcgccgcggcggcggcggcgccgcagcccgggtcggtgtaccgcagccacctcgtgttcgagcggctctggccggacatccgcgacgacgccagctccgcctccgccgccgcctcgtcgctctcctccacttcttggcgtcgcagcatgttgatgacatcgcactatcagaatcctggggagctatggatgccttgtgtcaacaggaagctgattcgaccagagttgccaccttcaaatggttatctcatgatcgaagcgaatggtggtctgaatcaacagcgtctttcgatctgtgatgcagttgctgtggccagtttgcttaatgcaactcttgtgatcccagcatttcattttaatagtgtttggcgtgatcatagcaaatttggtgacatctttgacgaagaccattttattgagacactcaaagaacatgttagagttgtgaaggaattacctgtagatgttttgacgcgcttcgatcataatatcagcagcataccaaatatgagaactaaggcctattcatctccaaatcactatatgcagaaggtgcttccgaaattgctggagttaggggctgtgcgaattgccccattctcaaatagactggcacaatcagttccatcaaatctccaggccttgagatgttttgttaactaccaagcgttgagatttgctgagccaataagagttctcgcagaggatatggttgaaaggatggtaaaacggagtactttgactggtgggaagtttgtatcagtacatcttcgcttcgaagaggatatggtagctttttcatgctgtacatatgatggtggcttgaaggagaaaactgaaatggaaaatgctcgtgaaagaagctggagaggaaagtttcatcggcatggtcgagtgatcaatcctgaggcaaacagaagagatggaaaatgtcctcttactcctctagaggttggtatgatgctgcggggcatgggatttgacaataccacctccctctatgttgcttctggtaaaatatacaatgctgaaaaatacatggcaccgcttcgacagatgttccctcttttggcaacaaaggatactcttgctttgcctgaagagcttgctgagtttgaggggcactcatctcgattagcggcattagattactcggtctgtcttccgagtgaggtctttgtgacaactcaaggtgggaacttccctcactttctgatggggcacaggcgctacctgtttggcgggaatgcaaggacaataaagccagacaaacggaagctggttttatctttcgatgatccgaatatcagatggaatcggttcaagcgccacatgcaggatatactacaccatagtgacatgaggggcactgcattgaggaaacccaatgattccatatacaccttcccaatgcctgaatgtatgtgccagcaagatgggatgatgtag

SEQ ID NO: 114 - protein, 562 aa, Oryza sativa
MSVALYARGGGCGAKAAAARRSGRGGGGRRRAAVVLLLALAYVAGLLVFVLAGGGGVGVGGRVEVGREVGVMTVASLRRRRAAAAAAPQPGSVYRSHLVFERLWPDIRDDASSASAAASSLSSTSWRRSMLMTSHYQNPGELWMPCVNRKLIRPELPPSNGYLMIEANGGLNQQRLSICDAVAVASLLNATLVIPAFHFNSVWRDHSKFGDIFDEDHFIETLKEHVRVVKELPVDVLTRFDHNISSIPNMRTKAYSSPNHYMQKVLPKLLELGAVRIAPFSNRLAQSVPSNLQALRCFVNYQALRFAEPIRVLAEDMVERMVKRSTLTGGKFVSVHLRFEEDMVAFSCCTYDGGLKEKTEMENARERSWRGKFHRHGRVINPEANRRDGKCPLTPLEVGMMLRGMGFDNTTSLYVASGKIYNAEKYMAPLRQMFPLLATKDTLALPEELAEFEGHSSRLAALDYSVCLPSEVFVTTQGGNFPHFLMGHRRYLFGGNARTIKPDKRKLVLSFDDPNIRWNRFKRHMQDILHHSDMRGTALRKPNDSIYTFPMPECMCQQDGMM

SEQ ID NO: 115 - DNA, 1488 bp, Oryza sativa
atggcgaaccctcgcggcggcggcggaggaggagcgcgccaccacctcccactccggccgcggcggctgctccggtcgccgatctcgcgctgcgcggtcctcctcgccgcctccgccgcgctcctcctcgtcctctccctccgccaggtccaccgcgtcggcctcccaccccgcgaccacccgcccgcccaggaaccaaatgagcagctgtggggttctgatggttacggttctcatgcttgtgtcacaccaacatctagatatatggctccaaaagggtcagagcgctacatgacagttaggagtaatggaggactcaaccaaatgcgtactggaatctgtgatatggttgcagtggcccgtttggtgaatgcaacacttgttattcctcaattagataagcgatccttttggcaagataccagtacatttaaggacatcttcaatgagcctcgttttattaaagctctggaaggggatgtcagcattgtgaatgacttgcctcaaagcctgcagtctgttccaagagctcggaagcactttacttcatggtctggtgctagttattatgaggaggtgaaacaactttggaaggatcacaaggtagttcacatcccgaaatcagattcacgacttgctaacaatggtcttccgattgatatccagagattaagatgccgctgtctttaccaagcactgcgtttttcagatccaattgagaaccttggaaagaagcttttggagcgtctaagatcacgtggaaaatttattgctcttcatctccgatatgaaaaagatatgctagcattcacgggatgcacttatggtctgagtgaatcggaagcagatgagttaagaattatgagggagaaaacaagccactggaaattgaaggacataaactcaactgaacagagatctggaggtaactgtccactaacgcctgaggaggtggggatttttctgcgagccatgggatatcctgaatccacatggatctaccttgcagctggtgaaatttatggcggtgataagtatatatcaaaattgagatcatacttcccgaacttggttagcaaggaagtgttagcaacaaaagaagagcttggtaaatttaacgaccatgcttctcaagttgcagcccttgattacatagtttcagttgaaagtgacgtgtttattccatcacattctggcaatatggcaagagctgttgagggacatcgtcgatttctaggtcatcgtaagactgtcactcctgacaggagaggattggtggaactctttgatttactacaaaaaggggaacttatggaaggtccaaagttttcctcacttgttactgagatgcataaaaacaggcaaggagctccaaggaagagatatggctccttgccagggagcaagggcagagcacgtctaaggaccgaggaatccttttatgaaaacccatttcccgagtgcatctgcctgaatggaaagcactga

SEQ ID NO: 116 - protein, 495 aa, Oryza sativa
MANPRGGGGGGARHHLPLRPRRLLRSPISRCAVLLAASAALLLVLSLRQVHRVGLPPRDHPPAQEPNEQLWGSDGYGSHACVTPTSRYMAPKGSERYMTVRSNGGLNQMRTGICDMVAVARLVNATLVIPQLDKRSFWQDTSTFKDIFNEPRFIKALEGDVSIVNDLPQSLQSVPRARKHFTSWSGASYYEEVKQLWKDHKVVHIPKSDSRLANNGLPIDIQRLRCRCLYQALRFSDPIENLGKKLLERLRSRGKFIALHLRYEKDMLAFTGCTYGLSESEADELRIMREKTSHWKLKDINSTEQRSGGNCPLTPEEVGIFLRAMGYPESTWIYLAAGEIYGGDKYISKLRSYFPNLVSKEVLATKEELGKFNDHASQVAALDYIVSVESDVFIPSHSGNMARAVEGHRRFLGHRKTVTPDRRGLVELFDLLQKGELMEGPKFSSLVTEMHKNRQGAPRKRYGSLPGSKGRARLRTEESFYENPFPECICLNGKH

SEQ ID NO: 117 - DNA, 1509 bp, Oryza sativa
atgtgcgtcgcggtggcggtgctcgtcgccggaaccgtctggctctgcgcgtcatcggcgggcttcatgggaggcccctacggcggctacagggttcaggatgttgatgtgaataagttgtggacgactgctggttcaaatggttggagagcatcttctgcaccacggtcatattggcctccccctccagctgagactaatggatacttgcgtgttcggtgcaatggcggattgaatcaacaaagaagtgctatatgtaatgctgttgttgcagctcgtataatgaatgctacattagttctaccagagcttgatacaaattctttctggcgggataaaagtggttttccaggtatctatgatgttccccattttctgaagactttaaaacatgatgttcatattgttacaagcctgcccgggattatgtcaaaagggaagactaagaagctcaaagctcataagattgtgccacctagagatgctccgctaagttggtatacaacattggctttggaagaaatgaagaagtatggggctatatatttaactcctttctcacaccgcttagcagaagatattgatgatccagagctccagaggttgagatgccgagtgaattaccacgcactacgatttaagccacatatcatgaaaattagcaatgagatagtgaacaagctacggtctgaaggccacttcatgtcaattcatcttcgatttgagatggacatgcttgcttttgctggatgcattgatatatttaccccagaagaacagaaaattctgatcgaataccgtgaaaaaaattttgcaaagaaaatccttgtttacaaggatagaagaatcatagggaagtgccccttgactccagaagaggtgggccttatccttcgtgccattggttttgacaattcaacccgtatttatcttgcatctggtgagatatttggtggtgatcgattcatgagtccatttagagcaatgtttcctcgcctagataaccacagttcagttggacctgaaaagctggaagaaaatactcgaggcttggctggatcagcagtagattatatggtctgtctcctgtcggatatcttcatgcccacgtacgatggtccaagcaactttgcaaacaacctcatgggccaccgcctctactatggcttccagacaacaattacaccaaacaggaaggcccttgctccaatattcatggacagggaggaaggccatgtaaccggttttgaggatcgagtcaggcaagtaatgttcaacacacactttggcggtccacacaagcgcattcatccagagtctttctatacaaactcatggcctgagtgcttctgccatatgaacccaatgaatccatctgacaagtgcccctcggatgatccacatgacgttctaggtggtcagttgcagaatgaagaaattgaagatgtagatttgaagaccactgacaagattgagtctattacccaaattgaagagactatgatttaa

SEQ ID NO: 118 - protein, 502 aa, Oryza sativa
MCVAVAVLVAGTVWLCASSAGFMGGPYGGYRVQDVDVNKLWTTAGSNGWRASSAPRSYWPPPPAETNGYLRVRCNGGLNQQRSAICNAVVAARIMNATLVLPELDTNSFWRDKSGFPGIYDVPHFLKTLKHDVHIVTSLPGIMSKGKTKKLKAHKIVPPRDAPLSWYTTLALEEMKKYGAIYLTPFSHRLAEDIDDPELQRLRCRVNYHALRFKPHIMKISNEIVNKLRSEGHFMSIHLRFEMDMLAFAGCIDIFTPEEQKILIEYREKNFAKKILVYKDRRIIGKCPLTPEEVGLILRAIGFDNSTRIYLASGEIFGGDRFMSPFRAMFPRLDNHSSVGPEKLEENTRGLAGSAVDYMVCLLSDIFMPTYDGPSNFANNLMGHRLYYGFQTTITPNRKALAPIFMDREEGHVTGFEDRVRQVMFNTHFGGPHKRIHPESFYTNSWPECFCHMNPMNPSDKCPSDDPHDVLGGQLQNEEIEDVDLKTTDKIESITQIEETMI

SEQ ID NO: 119 - DNA, 1533 bp, Physcomitrella patens
atgctgctttacatgggcggcgatatttctgtagactttccgccgtttccaggcaggcatcgacctggatctgtgtatcggagtgaccaagtgtttgagaatctatggccggagatggagcgggctgactcctccttttatggggttctatcggtttgggaataccctaaagacggtggaggctttacgccctgccttaattccataaaaaatgacgcaggtcttccagaatcaaacggttatattcttgtagaggccaatggcggacttaaccaacaacgctccacaatttgtaatgctgttgcagttgcaaagctactaaacgccactctcattataccccacttccatctgaacagtgtgtggaaagaccccagccgttttggggatatttttgatgaagagtacttcatcgaatctctatctcagcaagtaagaataatgcgggagctacctaaagaagtgatggcacgatatgagaacgctagcatgatatacaaaatatctaaggttaaagcatggtccctgcctcggttttacctggagtctgctctccctgagcttttaaaacggggagttatcaggttctctccctttgctaaccggttggcgtatgatggtattccgaagaaaattcaaaagttgaggtgttacaccaattttgtggccctgcgtttttcccagccaatcgcagagatgggtgacacagtagttaaacgaatgaaagctaagagtgcaagtactaatggcaattatgtctctattcatctgcggttcgaagaggacatggttgctttctctcaatgtgtctataaaggtgatcaagaagaaaaaactcagcttgataatgctcgggaaaagtcatggaggggtaaatttaacagaacagggcgtgtcaacttatccccagaggacattagaagagatggaaagtgtccaatgacacctgttgaggtaggaatgatgcttcgtggaatgggcttcagaaattctacgcccatatttctagcagccgggaacatctataaaggtgaagagagcatggaacccctccggagaatgtttccattgcttcaaactaaagagactttattatcaacagaggagctcaagcgcttcaagggcttttcgtcgcgattagcagccattgattacactgtctgcctatacagcgaggtatttgtgaccactcagggtggcaattttccccaaatattaatgggccatcgccggtttcttaacaagggccactctaagaccatcaaccctgacaagcgacgccttgttagactcctggatgatccacatattgcgtgggaggttttccggaagaatctagaagatatgcggaggcatagtgattttaaaggcttgcagccgcggaaggcactttctgtgaagaagaatgcgttttatactgttcctcctaaagcctctttgtacacatttcctgctccggaatgcatgtgtgcggaacctacgaacactgggaattcggagatgccagaagaagtcggagcttcccaagcataa

SEQ ID NO: 120 - protein, 510 aa, Physcomitrella patens
MLLYMGGDISVDFPPFPGRHRPGSVYRSDQVFENLWPEMERADSSFYGVLSVWEYPKDGGGFTPCLNSIKNDAGLPESNGYILVEANGGLNQQRSTICNAVAVAKLLNATLIIPHFHLNSVWKDPSRFGDIFDEEYFIESLSQQVRIMRELPKEVMARYENASMIYKISKVKAWSLPRFYLESALPELLKRGVIRFSPFANRLAYDGIPKKIQKLRCYTNFVALRFSQPIAEMGDTVVKRMKAKSASTNGNYVSIHLRFEEDMVAFSQCVYKGDQEEKTQLDNAREKSWRGKFNRTGRVNLSPEDIRRDGKCPMTPVEVGMMLRGMGFRNSTPIFLAAGNIYKGEESMEPLRRMFPLLQTKETLLSTEELKRFKGFSSRLAAIDYTVCLYSEVFVTTQGGNFPQILMGHRRFLNKGHSKTINPDKRRLVRLLDDPHIAWEVFRKNLEDMRRHSDFKGLQPRKALSVKKNAFYTVPPKASLYTFPAPECMCAEPTNTGNSEMPEEVGASQA

SEQ ID NO: 121 - DNA, 1422 bp, Physcomitrella patens
atgaaatttccttcgtttcctggtcggtatcggcccggctcagtgtatcgcagctatcgggtgtttgagaatctgtggcctgaaatggagcgcgctgactactcctcagatggggtgtggggtttgccagactcaaatgggtacattctcgtcaaggcaaatggcggtctgaatcaacagcgctccacaatttgtaatgccgttgcagttgcaaagctcatgaatgccactcttatagtaccccactttcatttcaacaccgtatggaaagatcccagcactttcggagatatatttgacgaggaccacttcattgaatctctttctaagcaagtaagaatattgcgagctctgcctcaagagatgctggatcgctacgacaatggtagcatgatattcaagatgaaagtgacagcgtggtctctcccccgtttttatctggaagaagctctccctgtgttaatagaacgggaagtcgtcaaattttctcccttcgccaatcgattggcatatgatgggattccgacggaaattcaaaaactgaggtgctattccaattttgttgccctgcgatttgcccaaccgattgctgatatgggtaacatgttagttagccgaatgaaatccaagtgtgcgaaaatgaatggcaattatgtcgccattcacctgcggttcgaagaggatatggtggctttctctcagtgtgtctacgatgatgatgaagaagaaaagacgaggcttgataatactcgggaaagagattggcgtggcaagttcacacgagagggccgtgccaatgcaccaccggacgaaattagaagaaatgggaagtgtcctctaacgcctgtcgaggtgggaatgatgctgcgtgggatgggtttcgacaagaatacccctatctatttagcagctggagtaatatacaaaggagaggaaagtatggagccgctccgaagaatgtttccgtatatccatagcaaagatactttactatcatcagaggaacacaagcaatttgagggcttttcatcgcggttagcagcccttgactacatcgtctgcctgcacagcgaagtatttgttacaacgcagggtggtaattttccccaaatactaatgggacatcgccggtttctaaacaaaggccactccagaactatcaacccagacaagcgacaccttgtccgactgctagacaaccctcacatcgaatgggacatctttcggaaaagtctgacagatatgcgcaggcaaagcgacatcaatggattccagcttcgaaagccaattccggtcaaaacagatgatcacttcacccagccacccaaagcgtcactgtacacacatcctgcccctgaatgtctgtgtgcggagcctgctacaagcacagaaagcacgcagaccctggtctccgaggcttga

SEQ ID NO: 122 - protein, 473 aa, Physcomitrella patens
MKFPSFPGRYRPGSVYRSYRVFENLWPEMERADYSSDGVWGLPDSNGYILVKANGGLNQQRSTICNAVAVAKLMNATLIVPHFHFNTVWKDPSTFGDIFDEDHFIESLSKQVRILRALPQEMLDRYDNGSMIFKMKVTAWSLPRFYLEEALPVLIEREVVKFSPFANRLAYDGIPTEIQKLRCYSNFVALRFAQPIADMGNMLVSRMKSKCAKMNGNYVAIHLRFEEDMVAFSQCVYDDDEEEKTRLDNTRERDWRGKFTREGRANAPPDEIRRNGKCPLTPVEVGMMLRGMGFDKNTPIYLAAGVIYKGEESMEPLRRMFPYIHSKDTLLSSEEHKQFEGFSSRLAALDYIVCLHSEVFVTTQGGNFPQILMGHRRFLNKGHSRTINPDKRHLVRLLDNPHIEWDIFRKSLTDMRRQSDINGFQLRKPIPVKTDDHFTQPPKASLYTHPAPECLCAEPATSTESTQTLVSEA

SEQ ID NO: 123 - DNA, 1539 bp, Physcomitrella patens
ttatgggaggcagaaaatacagaatggtactacggatgcagtgactccagtcgtttctttccttctgggccacctccggaatcgaatggttacttgtatattgcagctagtggggggctaaaccagcagcgcactgggattacagacgcagttgtggtggcgaagcttttgaatgccacgcttgtagtcccgcagctggatcataaatcatattggaaagacaacagcaatttcagcgatatcttcgacgtggattggttcatctcttctgtatccaaagatatcagagtcatcaaggaccctggtctagaaaaatcagtgtataccagaggagttccacggaaggccaagccagcctactacctttcgaaaattcttccaatcctgcaaaaaagaaaggcactacgattgaaccgatttgactataggttgtcaaatagactcagaagagactggcaaaaactaagatgcaggaccaactacaaggcactgcgatttacaagcaacatacaggcgatgggtcagactctgttggacaggatgcgggccaagagtggcggccgtttcattgcgttgcatctaaggcatgaaacttacaaaattttggcaaaatacatgctagcgttttcgggatgctactatggaggaggctcgaaggagattgcggaactgggtttgctccgcaagcgttggaagacaattcatcacgtcaattttgagcgggcgcggcgcaatggaaaatgtccgctgacgccgaaagaagttggtctcatgcttcgagctctcggttacggaaaagacacatacctgtatgtggcctctggggaggtctacaacggtgaagattcgcttgcgcccttgaaggcgctatttcctaactacttcacaaaggagacactcgccagaaaggaagaactagagccattcactcaatattcctcccgcatggcagccgtggattatattgtatgctcacagagcgatgtcttcgtgacgaataacaacggcaacatggcgcggatactggcaggggaaaggcgataccacggccacaagcggaccattcggccaaacgtgagaaaactcaacctcttgttctcagtattccagcagactccatgggcggagtttgctgccgaagtgcagcgagtgcagaagggcttcatgggcgatccgaatgaggtgaagattggacgaggggagtttcacgaacacccactggtctgcatttgcgctagacctggagcgccccctgtcgcgggacaggtgcaacaggcgctcggcagtacgacagccgcggagaccgaacaggaaactacagaaacagagatagatgcgccaggaacaccagacactgccactgaagaggaagagggagaggaagagagcaaggaggaagaagaggaccttcccatgatcatcgaagaagagcagtccgtcaatgcggagctggagcacgagcactccgacgccgggggaatgcaagtgatcagtctagacggtgacgacagcttcgacttgagaaacaaaaaagcctaa

SEQ ID NO: 124 - protein, 512 aa, Physcomitrella patens
LWEAENTEWYYGCSDSSRFFPSGPPPESNGYLYIAASGGLNQQRTGITDAVVVAKLLNATLVVPQLDHKSYWKDNSNFSDIFDVDWFISSVSKDIRVIKDPGLEKSVYTRGVPRKAKPAYYLSKILPILQKRKALRLNRFDYRLSNRLRRDWQKLRCRTNYKALRFTSNIQAMGQTLLDRMRAKSGGRFIALHLRHETYKILAKYMLAFSGCYYGGGSKEIAELGLLRKRWKTIHHVNFERARRNGKCPLTPKEVGLMLRALGYGKDTYLYVASGEVYNGEDSLAPLKALFPNYFTKETLARKEELEPFTQYSSRMAAVDYIVCSQSDVFVTNNNGNMARILAGERRYHGHKRTIRPNVRKLNLLFSVFQQTPWAEFAAEVQRVQKGFMGDPNEVKIGRGEFHEHPLVCICARPGAPPVAGQVQQALGSTTAAETEQETTETEIDAPGTPDTATEEEEGEEESKEEEEDLPMIIEEEQSVNAELEHEHSDAGGMQVISLDGDDSFDLRNKKA

SEQ ID NO: 125 - DNA, 1521 bp, Physcomitrella patens
atttgggatgcagagaactctgagtactactatgggtgcagtgagccctcgaaagattaccaaagtagttcacagatcaacgggtatcttctgattgcagctagtggtggcctaaatcagcaaagaacagggataactgattctattgttgttgctcgactattgaatgcaaccctagttgttccacaacttgaccatcgatcatactggaaagacaacagcaattttagtgacatttttgatgtggactggtttattaaatccgtatctcctgacgtgaaagtgatcaaggaactgcctcaaagtgataggaagtatctcttaaagcagttgtacagtcagcgtgtcccacgaaaggttccaccgcactattatcttacacgcattctgcccaatttgaaaaggagacattttatcaggcttaccaaattcgactaccgacttgccaacaggttggatgcagattttcagaagctgagatgccgcacaaattataaggcactgcgttttacccaacctattcaaaatatgggacaaaccattgcagatcggatgagagctaagggtgggcgatacattgcattgcatctaagatatgaatctgatatgttggcattttcgggctgctattacggtggcggtgagaaagagaaaagggaattgggcgctattcgcaaacggtggaagacgctgcattatcacgatcccgagcgagaaagacgcaatggaaagtgccctttgacccccgaagaagttggtcttatgctacgcgcacttggctatggcaacgattcgtatttatacgtggcgtctggtgaagtttacaacggggaggcttcattggcaccattgaaagccatgtttcctaattattacaccaaagacacaatatcaaaccagaaggagctacaaccttttttgaagtactcgtcgcgaatggctgctattgactacattgtctgttcaggaagtgatgtctttgtggccaataataatggaaatatggcccgaatattagctggtgaaagacgctacaatggccataagcgaacaattagacctaatgccaagaaactagggaggcttttgcctgctaggcacaacatgtcatgggcagagtttgccgaaaacgtgcgacattttcagaagggtttcatgggtgatccaatggaggtgagggctggtcgcggcgagtttcatgagaacccagcagcatgtatatgtgaaaaacctgaagcaaaggagaagcttcggcactggcgagaacagcaggcaaagaagccgaaaaaaccgcaagaagctactgaaattctgggacaagaccccgtcattcctgtagaagatagaatagacgctgaagaagaggaagacgaggaattacctctggtgattgaagatgagcagtcaaataatgaaacagaggtgaccggtatggaggatttgcttctagagacagaagattccaatgagcaagaaaatggtgatggagatgctgatggtgatgaagataacaacttttga

SEQ ID NO: 126 - protein, 506 aa, Physcomitrella patens
IWDAENSEYYYGCSEPSKDYQSSSQINGYLLIAASGGLNQQRTGITDSIVVARLLNATLVVPQLDHRSYWKDNSNFSDIFDVDWFIKSVSPDVKVIKELPQSDRKYLLKQLYSQRVPRKVPPHYYLTRILPNLKRRHFIRLTKFDYRLANRLDADFQKLRCRTNYKALRFTQPIQNMGQTIADRMRAKGGRYIALHLRYESDMLAFSGCYYGGGEKEKRELGAIRKRWKTLHYHDPERERRNGKCPLTPEEVGLMLRALGYGNDSYLYVASGEVYNGEASLAPLKAMFPNYYTKDTISNQKELQPFLKYSSRMAAIDYIVCSGSDVFVANNNGNMARILAGERRYNGHKRTIRPNAKKLGRLLPARHNMSWAEFAENVRHFQKGFMGDPMEVRAGRGEFHENPAACICEKPEAKEKLRHWREQQAKKPKKPQEATEILGQDPVIPVEDRIDAEEEEDEELPLVIEDEQSNNETEVTGMEDLLLETEDSNEQENGDGDADGDEDNNF

SEQ ID NO: 127 - DNA, 1677 bp, Physcomitrella patens
atggccattcgcgagccgaaggtcaagtacggttcacccgttgtcaagcatcgcgtgaactcgacatggtcgcagaagctgacccacttcttgctctcattcttccggagacgcaaccgggtgctgctcttcatccctttcatctatgtcacgggcatgctgctctacatggggggcgatatctctatggaatttccgccgtttcctggccgttatcgaccaggctccgtgtaccgcagcgatcaggtgttcgagaagttgtggcctgaaatggagcgtgccgactcgtcttcctatggggtcttgtccgcttgggagtatcccaaaaagggtggaggctttacgccgtgtcttagttccattaaccagaaagcaggtttaccagagtcaaacgggtacattctcgtagaagcaaatggcggtctaaatcaacagcgctccactatatgtaatgccgttgccgttgccaagcttatgaatgccacactcattataccccattttcatctcaacagtgtgtggaaagatcccagcaatttcggggaaatttttgatgaggctcacttcatcgaatccctgtctaaggaagtccgaatacttcgagatttgcctcaagagttacttgataaatttgacaatggtaacacgatattcaagctgaaagtgaaagcatggtctctcccccgtttttacctggaagaagctctccctgagcttttagagagagaagttatcaggttcacgccctttgctaatcgtctggcatacgatggcattccgaagagaattcaaaaattgagatgctacaccaattttgtagccctgcgtttcgctcagccaattgctaatatgggcaacatactagttaaacgaatgaaagcaaaaagtgcgaaaacaaatggcaattatgtgtctattcacctccggttcgaagaggatatggtagctttctcccaatgcgtctatactggtggcgaggaagaaaaaactcggcttgacaatactcgtgaaagaggttggcgtggcaagttcactagagaaggccgtgtgaatgcatcaccggagcagattaggagaaatggaaagtgtcccttgacgcctgttgaggtgggaatgatgctgcgtggaatgggtttcagcaacagcacacctatctatctagctgccggattgatatacaaaggagaggaaagcatggagccgctccgaagaatgtttccgtatcttcaaagcaaagaaactttactaacacccgaggaatataaacaattcaagggcttttcttcgcggttagcagctattgattacaccgtctgccttcacagcgaagtgtttgtgactacacagggtggtaatttcccccaaatactgatgggacatcgccggtttctcaacaaaggccactccaagactattaatcctgacaagcgacgcctagtcctgctactagacaatccccacattgagtgggacgcgttccggaaaatcctggtagatatgcggaggcacagcgacttcaagggcttgcagccccggaaatcgttccccgtcagtccaaaagcgtatttcacgaaccctcccaaagcgtcggtatacacattccccgctccagaatgcatgtgtgccgagcctgcaaacactaggacggcgacggaggtgctggtctccaaagcgtag

SEQ ID NO: 128 - protein, 558 aa, Physcomitrella patens
MAIREPKVKYGSPVVKHRVNSTWSQKLTHFLLSFFRRRNRVLLFIPFIYVTGMLLYMGGDISMEFPPFPGRYRPGSVYRSDQVFEKLWPEMERADSSSYGVLSAWEYPKKGGGFTPCLSSINQKAGLPESNGYILVEANGGLNQQRSTICNAVAVAKLMNATLIIPHFHLNSVWKDPSNFGEIFDEAHFIESLSKEVRILRDLPQELLDKFDNGNTIFKLKVKAWSLPRFYLEEALPELLEREVIRFTPFANRLAYDGIPKRIQKLRCYTNFVALRFAQPIANMGNILVKRMKAKSAKTNGNYVSIHLRFEEDMVAFSQCVYTGGEEEKTRLDNTRERGWRGKFTREGRVNASPEQIRRNGKCPLTPVEVGMMLRGMGFSNSTPIYLAAGLIYKGEESMEPLRRMFPYLQSKETLLTPEEYKQFKGFSSRLAAIDYTVCLHSEVFVTTQGGNFPQILMGHRRFLNKGHSKTINPDKRRLVLLLDNPHIEWDAFRKILVDMRRHSDFKGLQPRKSFPVSPKAYFTNPPKASVYTFPAPECMCAEPANTRTATEVLVSKA

SEQ ID NO: 129 - DNA, 1287 bp, Physcomitrella patens
ctgtggggaaagccagccagtcagatgtatggccagtgcatcgatcgagctaagaaggcagagaagcctggagtagcgacaaatggatacattctagtaaatgcaaatggcggtttgaatcagatgcgtgcaggaatttgtgacatggtggcaattgctaagctgatgaatgctacacttgtcacccccaaacttgaccacagctctttctgggcagatccaagtgaatttaaggacatttttgacttgaaatatttcatcgaatcgctcggagaagacgtcaatattgtggacgctttaccaccacatctcgcccagcttgagcctgtgactaaagcgcccgtctcttggtcgaaggcatcttactacgagaaggaactgctacccctccttaagcagagcaaggtgctgtacttcactcacgccgactcaaggctggcaaacaatgatctgcctgattatgtgcagcatctgagatgtcgagtcaactaccaagcgctccagtactcggaacccattcgacgattggcgagcaccctcaccaatcgcatgcgtaagaagggtccttacttagctttgcatctgagattcgagaaggatatgctcgcgtttacaggatgtgcgcatggtctctccaacaaggaggccgatgagctgaagcaaatgcgttacgaagtcaaacattggaaggagaaagagatcgatggagaggagaagcgtaagctgggtggctgccctctcactccccacgaagtagccctaatgctgaaagctttagggtatccatcctcaactcaaatctacatcgtggctggggaaatctatggacaaggtgctatggatagtcttcacaaagagtttccgaacgtgtataatcatgctacgctttcaacggaggcagagctggcttccttgaagaagtatcaaaatcggcttgctggcctagactacatggtggccttagagagtgatgtattcatttatacgtatgatggaaatatggccaaagctgtgaagggccaccgacagttcgagggttaccggaagaccattagccctgacaggtttcagctagtgaagctgatcgacgactatgaaggaggcgccatcgcgtggaagaattttgaaggccaggtgcgcaagatccacagcaaccgaataggggcgccgcgctggcgaatgcctggagaatcgcccaagttagaggagaatttctactccaacccttacccaggttgtatttgcaagaaggatcctccgaaccgacgtttcctccgaagaccgtga

SEQ ID NO: 130 - protein, 428 aa, Physcomitrella patens
MWGKPASQMYGQCIDRAKKAEKPGVATNGYILVNANGGLNQMRAGICDMVAIAKLMNATLVTPKLDHSSFWADPSEFKDIFDLKYFIESLGEDVNIVDALPPHLAQLEPVTKAPVSWSKASYYEKELLPLLKQSKVLYFTHADSRLANNDLPDYVQHLRCRVNYQALQYSEPIRRLASTLTNRMRKKGPYLALHLRFEKDMLAFTGCAHGLSNKEADELKQMRYEVKHWKEKEIDGEEKRKLGGCPLTPHEVALMLKALGYPSSTQIYIVAGEIYGQGAMDSLHKEFPNVYNHATLSTEAELASLKKYQNRLAGLDYMVALESDVFIYTYDGNMAKAVKGHRQFEGYRKTISPDRFQLVKLIDDYEGGAIAWKNFEGQVRKIHSNRIGAPRWRMPGESPKLEENFYSNPYPGCICKKDPPNRRFLRRP

SEQ ID NO: 131 - DNA, 1386 bp, Physcomitrella patens
aaacagctttgggaaccgccagcagataaaggatttgtcccttgtgtcgaaccaggcccagcgcactcaggccctaagcctgccaaaggctatctaatggtgtccacaaatggtggactcaaccagatgagagcagggatttgtgatatggtagcaattgcacgattaatcaacgctactcttgtaatcccagaactggataagggttcattttggcaagatgccagcaatttttcagatgtttttgacgttgagtatttcataaaggcgctggctaatgacatccctgtcatcaaggcgctccctccgagcatgaagagcgagcccaaagtcttgaagcaatttcgaagctggtctggcgtgaagtattacgaacaagaaataggaagactatggctgaactataaggtgataaaagctgcgaaaacagatttgcgccttgcaaataaccacctacccgccgagattcagaagctgcgctgccgagtacactacgatgcactacgttttgctcctcacatcgaagctttggggaaggtgatagtggaaagactgagatcggcaggaccttacatcgcattacatctgcggtatgaaaaagacatgctggcctttagcggctgcacgtatcaattatccacagaagaagcccaagagcttaccactataagggaaaatacacctcattggaaggttaagaagataaatggaacagagcaaaggaggaacgggttttgtcctcttactccgacagaagttggcgtgtttctgaagtcgctaggttaccccgagagcactcgaatatacgttgcggctggagagatttatggtggtcgtgagcggatgtcaggtcttctttcccgcttcccaaacgtgatgagcaaggaatacattgccaccgcttcagaactggcgccgttttttaatcattcgtcccaaatggcagcactggactatatagtatccgttgagagtaatgtattcgtgtcgtcctactctggaaacatggcgcgtgccgttgaaggacaccgccgctttttgggtcaccgcaaaaccatcagccctgatagaaaggaactcgttgctctgtttgatatgctagaccaaggtcttctcaaagaggaccagaatcttgcggatgtgataactacaatgcacgagaatcggcaaggcgctcctcgcaagcgtaaaggaccgctgaaaggaacgaaaggtagagaccgtctgcggtccgaagaggctttctacacaaatcccacgccagattgtttgtgtcaacaatccgacttccctaaacatgtaaattacgaacagaactattctcctcaagagacggagcgagaagggaggcagatggagtcaggggttgcagtgcaaagaagatag

SEQ ID NO: 132 - protein, 461 aa, Physcomitrella patens
KQLWEPPADKGFVPCVEPGPAHSGPKPAKGYLMVSTNGGLNQMRAGICDMVAIARLINATLVIPELDKGSFWQDASNFSDVFDVEYFIKALANDIPVIKALPPSMKSEPKVLKQFRSWSGVKYYEQEIGRLWLNYKVIKAAKTDLRLANNHLPAEIQKLRCRVHYDALRFAPHIEALGKVIVERLRSAGPYIALHLRYEKDMLAFSGCTYQLSTEEAQELTTIRENTPHWKVKKINGTEQRRNGFCPLTPTEVGVFLKSLGYPESTRIYVAAGEIYGGRERMSGLLSRFPNVMSKEYIATASELAPFFNHSSQMAALDYIVSVESNVFVSSYSGNMARAVEGHRRFLGHRKTISPDRKELVALFDMLDQGLLKEDQNLADVITTMHENRQGAPRKRKGPLKGTKGRDRLRSEEAFYTNPTPDCLCQQSDFPKHVNYEQNYSPQETEREGRQMESGVAVQRR

SEQ ID NO: 133 - DNA, 1320 bp, Physcomitrella patens
ctatgggccaagcccaaaagtgactcctaccatcagtgcattgaccgcccggaggggtataaacggccagataataagacaaacggatatctgttggtcaatgctaatggcggtctcaatcaaatgcgcggagggatatgtgatatggtggcgattgcccggctgatggatgcgactctggtggtgcctgttctcgatcacagctccttttgggctgatcctagtgaatttaaagacatatttgatgtcaagcattttatcaactcactccaggaagacgttcacattctagaggccctgccagcctctgtggccgacattgagcctatgctaaaagctcccgtctcttggtccaaggcaccatactacaaggacgagatggtgtctcttctgaagcggcacaaagtgctgtccttcactcacgccgactcgcggttggcaaacaacgacttgcctgacgagacgcaacgacttcgttgccggtccaactacgttgccctcaagtatgctgagcccatccacagattggcccaaacgttgatcaagcgattacaaaatgacggcccttacattgctctccaccttcgatacgagaaggacatgttggcatttacgggctgtgcacatggattgtcggctgaagagggcgaagagcttcggcagatgaggtactccgtcccgcactggaaggagaaggacatcgacagtgagctcaagcggatggaggggggttgcccgctaaccccacacgagaccgggctcctgctcaaggcgcttgggtacccttccaccaccaagatatatatagtagcgggggagatttacgggaacggaacgatggatgctctgaagaaaatatttcccaacgtgtatgaccacatgacgcttgccactgaagcggagctggcgcctctcaaaaacttccagaatcgcttggcggcgttggattacattctagcgctggagagtgatgtgttcgtctacacctacgatgggaacatggccaaggctgtgcaagggcatcgtcagtttgagggctaccagaggacaattatccccaatagggaaagtctagtgaagctggtggacgaatacgagaacaaaaccatctcctgggaaaccttccaagagagcgttgccaatatccacgcggaccgaaacggggcgccgcactaccgggaacctggtgaatctcccaaactggaagagaatttctacgccaaccctttccctggttgcatctgccagcgagagaatcacaccagtgacaacaacaacaacaagcatgagtccaatcgtcggctgctgggacactcttaa

SEQ ID NO: 134 - protein, 439 aa, Physcomitrella patens
LWAKPKSDSYHQCIDRPEGYKRPDNKTNGYLLVNANGGLNQMRGGICDMVAIARLMDATLVVPVLDHSSFWADPSEFKDIFDVKHFINSLQEDVHILEALPASVADIEPMLKAPVSWSKAPYYKDEMVSLLKRHKVLSFTHADSRLANNDLPDETQRLRCRSNYVALKYAEPIHRLAQTLIKRLQNDGPYIALHLRYEKDMLAFTGCAHGLSAEEGEELRQMRYSVPHWKEKDIDSELKRMEGGCPLTPHETGLLLKALGYPSTTKIYIVAGEIYGNGTMDALKKIFPNVYDHMTLATEAELAPLKNFQNRLAALDYILALESDVFVYTYDGNMAKAVQGHRQFEGYQRTIIPNRESLVKLVDEYENKTISWETFQESVANIHADRNGAPHYREPGESPKLEENFYANPFPGCICQRENHTSDNNNNKHESNRRLLGHS

SEQ ID NO: 135 - DNA, 1308 bp, Physcomitrella patens
gacagactgcgaagttccactccgtccttgggctggcgatcgtcagcggcctcgcgaaatcctgaatggtcaccaccaccagaaagaaccaacggatatcttcttgtgcggtgtaatggtggcctcaaccagcagcggggtgcaatttgtaatgccgtgctagcagcacgaatcatgaacgccacccttgttttaccggcactagatacaaattccttctggcacgacaaaagtggtttttcaggaatatatgacgtgaggcatttcatcacctcacttgccaacgacgtaaaggttgtcacgaccctaccccttgtgggtgttgtttacaagcagcacaggagaatcaaaccctttcagttgcgtcctcctcggaatgcgcttccaaattggtacgagacggtggcccttgcaaagatgaaagagcatggggctatccttcttagcccattttcacatcgcttagctgaggagttagataacctcgactatcagcgccttcgctgccgggttaattatcatgctttgcgctttcgggaggatgttatgagtcttagcagcaagattgttgcacggctacgagcagaaggccaatttcttgccatccatctccgatttgaaatggatatgcttgcatttgcagggtgtacagacatttttactgtcgcggagcaagcaatgctcgtgaagtatcggatggaaaatttcgcggagaaaacattgcactatactgatagacgtttgatagggaaatgccctcttactccagaagaagtggggctgattttaagggctcttggctatgacaattctactcacatttatattgctgcaggagacatatttggcggtgaacggttcatggatcccctgcggaaattcttccctcgtctcaaaactcgcaagacagtggccactgctgatgaactgaacaggatcagtacagagggtctgcttggtcctgcagtcgattatatggtgtgtttgctatctgatattttcatgcccacctttgaaggacccagcaactttgccaacaatttattgggacatcgattgtacaatgggtttcacaagtctattatacctgataggagggcattggctcctattttcatgaaaatggaagagggatcacttgaccaaggagaattcaaagaaagggtgaaggctgccatgcggactacattggttgctggtcctcacacacgcgttgaaccagagtcattttataccaatccatggccagagtgtttctgtaaacctcatgctgctcgaaaaagttatcagtgtcctggcccaatctga

SEQ ID NO: 136 - protein, 435 aa, Physcomitrella patens
DRLRSSTPSLGWRSSAASRNPEWSPPPERTNGYLLVRCNGGLNQQRGAICNAVLAARIMNATLVLPALDTNSFWHDKSGFSGIYDVRHFITSLANDVKVVTTLPLVGVVYKQHRRIKPFQLRPPRNALPNWYETVALAKMKEHGAILLSPFSHRLAEELDNLDYQRLRCRVNYHALRFREDVMSLSSKIVARLRAEGQFLAIHLRFEMDMLAFAGCTDIFTVAEQAMLVKYRMENFAEKTLHYTDRRLIGKCPLTPEEVGLILRALGYDNSTHIYIAAGDIFGGERFMDPLRKFFPRLKTRKTVATADELNRISTEGLLGPAVDYMVCLLSDIFMPTFEGPSNFANNLLGHRLYNGFHKSIIPDRRALAPIFMKMEEGSLDQGEFKERVKAAMRTTLVAGPHTRVEPESFYTNPWPECFCKPHAARKSYQCPGPI

SEQ ID NO: 137 - DNA, 1260 bp, Physcomitrella patens
atgcgagcagggatctgtgatatggtggcggttgcacgcatattgaacgctacattggttgttccggagcttgataagcgatcattttggcaggattctagcaacttctcggatatatttgacgtagaccatttcatagaggccttaagaggtgatgttcatgtggttaagtcgcttcctcaagaatatttattagcacctaaagccgtgaaacagtttcaaagctggtccaacgtaaagtactatgtggatatcatcgctcctgtttggcgggactacagggtcattcgcgcttctaagtccgattcgcgcttggcaaataatgacttgcctgcggacatacagaagttgcgatgtcgggttcattatgatgctcttcgattttcctgtgccattgatgagtttgggaagaaacttgtagagagattgagaagaaatggaccctacattgctttgcatcttcggtatgagaaggatatgttagcctttagtggctgcacccatggtctaacacacaaagaagccgatgagttgaccactataagacagactacagcccattggaaggtgaaggacatcaactctaccgatcaaagggtaaaagggtattgcccgctgacaccaaaagaggtcgggattttcttgaaggctttgggctacccggagaccacacccatttacattgctgctggcgagatttatggtggtgatgaacgtatgaaaggcctgctttctcggtttccaaatgttttgcgtaaggagaccgtagccacgccagaggagcttgcaccattcgtcaatcactcctctcaactggcagcattggactacattgtttccgtggaaagcaacgtgttcgtaccttcctactcagggaatatggccagagctgtggaaggacatcgacggtaccttgagcaccgcaagaccataacccctgacaggaaagagcttgtagcgctctttgacaagctagacagaggagaacttactgaaggcccagagcttgcggagatgatcgctaacattcacaagcggaggcaaggagcgccacggaaacggaaaggtcccatcacaggtacaaaaggaagggaccggtttaggacggaagaggtcttctacacaaatcctctaccagattgtttatgttctgagactgatccaatcaacattaagcccaaaattttcaacacggataggcagcttttgagccatgatcctcaatggagggatggcctcaattcatggcaaagacactag

SEQ ID NO: 138 - protein, 419 aa, Physcomitrella patens
MRAGICDMVAVARILNATLVVPELDKRSFWQDSSNFSDIFDVDHFIEALRGDVHVVKSLPQEYLLAPKAVKQFQSWSNVKYYVDIIAPVWRDYRVIRASKSDSRLANNDLPADIQKLRCRVHYDALRFSCAIDEFGKKLVERLRRNGPYIALHLRYEKDMLAFSGCTHGLTHKEADELTTIRQTTAHWKVKDINSTDQRVKGYCPLTPKEVGIFLKALGYPETTPIYIAAGEIYGGDERMKGLLSRFPNVLRKETVATPEELAPFVNHSSQLAALDYIVSVESNVFVPSYSGNMARAVEGHRRYLEHRKTITPDRKELVALFDKLDRGELTEGPELAEMIANIHKRRQGAPRKRKGPITGTKGRDRFRTEEVFYTNPLPDCLCSETDPINIKPKIFNTDRQLLSHDPQWRDGLNSWQRH

SEQ ID NO: 139 - DNA, 1410 bp, Physcomitrella patens
aaactttggaagcctcctcctaaccgaggattccatccttgcgttgagcctagcgagtcttactcaggtccaggtatatccagagggtatcttctggttcaaagcaatggcggtttaaatcagatgcgagcagggatttgtgatatggtggcggttgcacgcatactgaatgctacgttggttgttccggagcttgacaagcgatcattttggcaggattctagcaacttctcggatatatttgatgcggatcattttatagcggccttaagaggcgacgttcatgtggtgaaatcacttcctcaagaatatttattagcacctaaagccgcgaaacagtttcaaagctggtccaacgtaaagtactatgtggatgccattgctcctgtttggcgggactacaaagtcattcgcgcttctaaatctgattcacgcttggcaaataatgacttgcctgcggacatacagaagctgcgatgccgtgttcattatgatgccctccgattctcacgtgcgattgatgagtttgggaagaaacttgtagagagattgagaacaaatggaccctacattgctttgcatcttcggtatgagaaggatatgttagccttcagcggctgcacacatggtctaacacacaaagaagctgacgaattgactactataaggcaagcagatttaaaccctattattttacatactaccgcccattggaaggttaaggacatcaactctaccgaccaaagggtaaaagggtattgcccgctgacaccaaaagaggtcgggattttcttgaaggccttgggctacccggagactacaccaatttacattgctgctggcgagatttatggtggtgatgaacgcatgaaaagcctgctttctcggtttccaaatgttttgcgaaaggagaccgtagccacgccagaggagcttgcaccattcgtcaatcactcctctcaactggcagcattggactacattgtttctgtggaaagcaacgtgttcgtgccttcctactcagggaacatggccagagctgtggaaggacatcggcggtaccttgggcaccgcaagaccataaccccagacaggaaagaacttgtagcactctttgacaagctagacagaggagagctcactgaaggcccagagcttgcggagacgatcgcaaacattcacaagcggaggcaaggagcgccacggaaaaggaaaggtcccatcacaggtacaaaaggaagggaccggtttaggacggaagaggccttctacacaaatcctcttccagattgtttgtgttcggagactgatccaatcaacataaagcccaaaaacttcaacacggataggcagcttttgagccatgatcctcaatggagggatggccacaattcatggcaaagacactag

SEQ ID NO: 140 - protein, 469 aa, Physcomitrella patens
KLWKPPPNRGFHPCVEPSESYSGPGISRGYLLVQSNGGLNQMRAGICDMVAVARILNATLVVPELDKRSFWQDSSNFSDIFDADHFIAALRGDVHVVKSLPQEYLLAPKAAKQFQSWSNVKYYVDAIAPVWRDYKVIRASKSDSRLANNDLPADIQKLRCRVHYDALRFSRAIDEFGKKLVERLRTNGPYIALHLRYEKDMLAFSGCTHGLTHKEADELTTIRQADLNPIILHTTAHWKVKDINSTDQRVKGYCPLTPKEVGIFLKALGYPETTPIYIAAGEIYGGDERMKSLLSRFPNVLRKETVATPEELAPFVNHSSQLAALDYIVSVESNVFVPSYSGNMARAVEGHRRYLGHRKTITPDRKELVALFDKLDRGELTEGPELAETIANIHKRRQGAPRKRKGPITGTKGRDRFRTEEAFYTNPLPDCLCSETDPINIKPKNFNTDRQLLSHDPQWRDGHNSWQRH

SEQ ID NO: 141 - DNA, 1023 bp, Physcomitrella patens
atctggcagattgcggatgcggtgatcgtggctcgtcagttaggagctacccttgtgatgcctaccataaaagaaggcctgactgagccaatcagtaaatttgatgacatatacaatgtcaagcacttcatcgccactctggagggagttgtgaggatagtggggcggttacccgaggacctccgaaacgtcaaccacaccagcgtagaattacctcacaaaatcacgaaggctgaaatcgacaataagattcggcccatatttgtgaagagctcggtaatagtgttgaacaagtttttgctaagcatgaaagacgtgaaagacgagcgagatcctgagattgaggccattcggtgcttggtccagtacaaagccttgcagttccagcctcagatagagaagcttggcaatcgtctgaataacagaatgaaggaagcagctcagagccttggtgggaaatacgttgccgtggattatagatctacggataaggcttgtggtcaaaggactgacaacgtttttacaatgccgaagggctgcctgtcccctcttgacctcggtctgttgctgcagtcacatgggtttgcccgtgagactgcaatttatttgactcaaactcgactagatgagtcattcgaccctctcctcaagctctatccgattgtcattaccaaggagtacagtatgccgttcaacgaagagaaccagtttctgtactctggcatgacccagtttgagctggcgatagacttctatatctgctcacacagcgatgtgttggtgcccatccactcgagcacgttctacactgcattggcaggggagcgcatcaagcaaggtttcacacacatgcttgtgcccaggctcttgagaattgctagggaggctccagaggccacctctctcacgcttggtgtgcctcgaattgtgacgaagaggctccatccagcgtactcttgcctctgtgaacaggggatgagcaaggcacttgctctagtgcccagttcaccgacgtcacggtaa

SEQ ID NO: 142 - protein, 340 aa, Physcomitrella patens
IWQIADAVIVARQLGATLVMPTIKEGLTEPISKFDDIYNVKHFIATLEGVVRIVGRLPEDLRNVNHTSVELPHKITKAEIDNKIRPIFVKSSVIVLNKFLLSMKDVKDERDPEIEAIRCLVQYKALQFQPQIEKLGNRLNNRMKEAAQSLGGKYVAVDYRSTDKACGQRTDNVFTMPKGCLSPLDLGLLLQSHGFARETAIYLTQTRLDESFDPLLKLYPIVITKEYSMPFNEENQFLYSGMTQFELAIDFYICSHSDVLVPIHSSTFYTALAGERIKQGFTHMLVPRLLRIAREAPEATSLTLGVPRIVTKRLHPAYSCLCEQGMSKALALVPSSPTSR

SEQ ID NO: 143 - DNA, 1458 bp, Physcomitrella patens
atgctccaagctgttaaagtcgagtccaatgaagctaagtacgggcatgaatcacaaatactcgtagatacttcggctgtgtcaataccgtcacaggaacatactgcagtgagtaaagatgtgggaggtgttttggatagtaacctgtgggccaagcccaacagcgattcttatcaccaatgcatagaccgtcctaagggctacaagcacccaggtaacaataccaacggatatctgttagtcaatgctaatggcggtctcaaccaaatgcgaggaggaatttgtgacatggtagcgattgcccggctgatggatgcgacactagttgtacctgttctcgaccacagctccttttgggcagatccgagtgagttcaaggacatttttgatgtcaagcatttcattgagtctctccaagaagacgtccacattgtggaggccctgcctgcttcgatggctggcatcgagcccatgatgaaagcccccgtctcttggtcaaaggcgtcatactacaaagatgagctggtgcctctcctcaagcagcatgaagtgctgtcattcacacactctgactcgcggcttgcgaacaatgacttgcctgatgaggcgcagcgccttcgttgccggtccaactatgttgccctcaagtatgctgaccccatcagcaaattatttcaaacgttagtcaagcgattacgaaacgatggcccttacattgcactccatcttcgatatgagaaggacatgttggcatttaccgggtgtgtgcacggactatcggctgacgaaggtgaggaacttaggcagatgaggtactcggtcccgcattggaaggagaaggaaattgacagtgagctgaggcggaaggaagggggttgccctctcactcctcacgagacggggcttctgctgaaggcgctcggctaccctgcgtcgaccaagatatatatagtggcaggggagatttacggtaatggaacgaaggatgcgttgaagaagattttccgcaatgtgtacgatcacatgacgctcgccacagaatcagaactggcgcctctcaagaggtttcagaatcgcttggcagcgttagattatatgctagcgctagagagcgatgtgttcgtgtatacctacgatgggaacatggccaaggctgtgcaggggcatcgccagtttgagggctatcggagaacaatcaaccccaacagggaaagtcttgtgaggctcatagacgaatacgagaataaaacaatttcttgggagattttccaaactgaggttcgcaacatccacttggaccgcataggggcgccgcactacagggaagcgggggaatctcccaaactggaggagaatttctatgccaaccctttcccaggttgcatctgtgagcaagagagtcatcaaaatgatgaggataagcatgaatccaaccgtcggctcctcagacattcttag

SEQ ID NO: 144 - protein, 485 aa, Physcomitrella patens
MLQAVKVESNEAKYGHESQILVDTSAVSIPSQEHTAVSKDVGGVLDSNLWAKPNSDSYHQCIDRPKGYKHPGNNTNGYLLVNANGGLNQMRGGICDMVAIARLMDATLVVPVLDHSSFWADPSEFKDIFDVKHFIESLQEDVHIVEALPASMAGIEPMMKAPVSWSKASYYKDELVPLLKQHEVLSFTHSDSRLANNDLPDEAQRLRCRSNYVALKYADPISKLFQTLVKRLRNDGPYIALHLRYEKDMLAFTGCVHGLSADEGEELRQMRYSVPHWKEKEIDSELRRKEGGCPLTPHETGLLLKALGYPASTKIYIVAGEIYGNGTKDALKKIFRNVYDHMTLATESELAPLKRFQNRLAALDYMLALESDVFVYTYDGNMAKAVQGHRQFEGYRRTINPNRESLVRLIDEYENKTISWEIFQTEVRNIHLDRIGAPHYREAGESPKLEENFYANPFPGCICEQESHQNDEDKHESNRRLLRHS

SEQ ID NO: 145 - DNA, 1035 bp, Physcomitrella patens
cacttcattcactacctcaaagatgatgtccacataatcagggagcctccaaattggatccctcatcacaaggaattttactcctcaattagcagattcaccatcaagaacatccccaagtacgcaagtgcccaattctacctacaaaatgttcttccacagatcaaggaaaagaaactcatggctctcaagccctttgccaatagacttgggtatgaaaatgtgccagttgagataaacaagttacgatgccgtgtgaactatcatgccctaaagtttctacctgagactgaaaaaatggctgatgtccttgtggcacggatgcacaatcggacaggcaaacaaactcctttcatggcattacatttgcggtttgagaaaggaatggtgggattatccttttgtgactttgttggaactcgcacagaaaaggctgcactaagggaatacagaaagaaggaatggccaagacaattcaagaatgacaccatgatgtggaatgaggccctctgcaagcggaagcaaggaaaatgcccactagaacctggtgaggttgctctgattctcaatgcaattggctacaaaaaggattcccaagtttatgttgcatctggtgcactctatggaggaaatacccagatgcttccactccagagaatgtttcccaacttggtccgaaaagaggatttagccagcaaggaggagcttgctccctttcagaggcacatcacatctttagcagcattggatttcttggtgtgcttgaagtcggatgtgtttgtggtgactcatggtggcaacttcgcaaagcttgtcatcggtgctcgtaggtactactacggccaccgacggaaatccatcaagccctacaagggggtgatggcatatgcacttggagatcctttcatgagttggacaagttttgtccatgaggttgccgagatgcacaagacgagaaccgggttgcccgaggcaacgagtcccatgtatgacatttgggagaatccactcactccttgtatgtgccaatcctga

SEQ ID NO: 146 - protein, 344 aa, Physcomitrella patens
HFIHYLKDDVHIIREPPNWIPHHKEFYSSISRFTIKNIPKYASAQFYLQNVLPQIKEKKLMALKPFANRLGYENVPVEINKLRCRVNYHALKFLPETEKMADVLVARMHNRTGKQTPFMALHLRFEKGMVGLSFCDFVGTRTEKAALREYRKKEWPRQFKNDTMMWNEALCKRKQGKCPLEPGEVALILNAIGYKKDSQVYVASGALYGGNTQMLPLQRMFPNLVRKEDLASKEELAPFQRHITSLAALDFLVCLKSDVFVVTHGGNFAKLVIGARRYYYGHRRKSIKPYKGVMAYALGDPFMSWTSFVHEVAEMHKTRTGLPEATSPMYDIWENPLTPCMCQS

SEQ ID NO: 147 - DNA, 1344 bp, Physcomitrella patens
atgcctcacactcgacacgaagaccgccgtaagatacaagcttcatggcccagtgacatatggttgaagccggacagtcgcaactacggccagtgtattgatcgaaccaagaattcagacaggcctagagctaagccgaacggctacattctagtaaatgccaacggtggtttaaaccagatgcgatcagggatttgtgacatggtggctgttgcgaagctgatgaatgctatccttgtcgtccctaaacttgaccacggttccttctgggcggacccaagtgaattcaaggacatctttgatttgcagcacttcattgagtcacttcaggaagacgtgaccatcgtggaggctctaccaccccacctcgccgatattgagcccgtcagcaaagctcccatctcttggtcgaaggcgtcgtactacgagaccgagctggtgcctttgctcaagcagagcaaggttctctacttcacccacgcggattcaaggctagcaaataatgacctgcctgactacgttcagcagctccgatgtcgcgtcaattaccgagcactgcagtactcacagcccattcgacacttggcgggcatactcataaagcgtatgcgtgaggatagttcttacttagctctacatctgagatacgaagaggacatgttggcgttcacaggctgtacacatggtctgtcccctgaggaagccgaggagctcaagcagatgcggtatggggtcaagcattggaaggagaaggagatagatggcgaagagaagcgcaagctgggtgggtgtcccctcacgcctcacgaaacagggctcatgctgaaagctttgggttatccttcctcaaccaagatctatattgttgctgggaagatctatggccggggcaccatgaacagtctccataaagagtttccgaacgtgtatgatcatgcaactcttgcgacggaggaggagctggctcccctgtcgaagtatcagaatcggctggcgggactggactacatggtggccctcgagagtgatgtctttgtttacacatatgatgggaatatggcgaaggctgttatgggtcaccgacagttcgagggttaccgaaaaactgtcagcccggacagagagcggctagtgaagctgatcgatgactacgaagcagaaatgatcacatggaaagagtttgagacccaggtgcgaagggttcataacaatcgcaatggagctccgagatggcggcagcgtggagaagtacccaagctggaggaaaacttctactcaaacccttacccgggttgcatatgcaagaagaagccttacagtcggcggttgctcaagagaccatga

SEQ ID NO: 148 - protein, 447 aa, Physcomitrella patens
MPHTRHEDRRKIQASWPSDIWLKPDSRNYGQCIDRTKNSDRPRAKPNGYILVNANGGLNQMRSGICDMVAVAKLMNAILVVPKLDHGSFWADPSEFKDIFDLQHFIESLQEDVTIVEALPPHLADIEPVSKAPISWSKASYYETELVPLLKQSKVLYFTHADSRLANNDLPDYVQQLRCRVNYRALQYSQPIRHLAGILIKRMREDSSYLALHLRYEEDMLAFTGCTHGLSPEEAEELKQMRYGVKHWKEKEIDGEEKRKLGGCPLTPHETGLMLKALGYPSSTKIYIVAGKIYGRGTMNSLHKEFPNVYDHATLATEEELAPLSKYQNRLAGLDYMVALESDVFVYTYDGNMAKAVMGHRQFEGYRKTVSPDRERLVKLIDDYEAEMITWKEFETQVRRVHNNRNGAPRWRQRGEVPKLEENFYSNPYPGCICKKKPYSRRLLKRP

SEQ ID NO: 149 - DNA, 1314 bp, Physcomitrella patens
gtctcctttggagcagctctgccagcttttacaaacggatatttgcaagtatttttggaaggcggcctgaatcaacagcggatggggatttgtgatgcggttgctgttgcaaaaattctgaatgcaactcttgttcttcctcatttcgatgttaatccagtttggaaagactccagctccttcgcagacatattcaatgtggaccacttcttgaatactttagggtttgaggtcaatattgtaactaaactgcctcccgaatttgaatggagcacacgagaatattatgctacgggctatcgtgctacccgtgtgaaaaatgctcctgtgcaagcctctcccgagtggtacatcacaaatgtattgccccttttgcgcaggtatggctctggagtagttgcaattgccccattttcacacaggcttgcatttaatgatcttccagacgagattcagcgtttacgttgcaaggtgaactttgaagctctccgattcgtaccgagcattgataacataggaaacattctagtcgagagactgcgaaaatctcacgcatggaccgtggagggtgatgacgttgggagctctaaatatctggctctacatctccgctttgacaaggacatggccgctcactcagcatgcgactttggaggaggcaaggcagaacgattagctcttgcaaagtatcgcggtgttgtttggcaagggcgtgttagtaatgcccagctttcggacaaggagttgcgtgacaagggcaaatgcccgatgtcacctgaggaggttggtataatgctggtagcgttaggcttcagcccaaagacacatgtctacctggcttcatacactgtttacgggggctctgcaaggatggattttctacacaatttgtttcccaacatggtcactaaatatacactcgccacagccgaggagcttgcaccatttgctggaaaagcttcacaactggcagctattgactacctcgtttctcttcacagtgatatctttctttctgcgtctcgtggcaatatgcacaatagtttggctgctcatcgcacgtacttgaacgtgagaaagacaataaaaccagacatgaacctgatggctcggctttttgcgcacaaaaacttgacttggccagaattcagaagaagtgtggttgaaggccacaaaaataggatgggtcaagttgccctgcgacaacctacccagtccatctacacctacccagcaccagactgtatgtgtacgagtagacgctccattgcagagcattcaaatctggacatggatctgcaggaagccagatag

SEQ ID NO: 150 - protein, 437 aa, Physcomitrella patens
VSFGAALPAFTNGYLQVFLEGGLNQQRMGICDAVAVAKILNATLVLPHFDVNPVWKDSSSFADIFNVDHFLNTLGFEVNIVTKLPPEFEWSTREYYATGYRATRVKNAPVQASPEWYITNVLPLLRRYGSGVVAIAPFSHRLAFNDLPDEIQRLRCKVNFEALRFVPSIDNIGNILVERLRKSHAWTVEGDDVGSSKYLALHLRFDKDMAAHSACDFGGGKAERLALAKYRGVVWQGRVSNAQLSDKELRDKGKCPMSPEEVGIMLVALGFSPKTHVYLASYTVYGGSARMDFLHNLFPNMVTKYTLATAEELAPFAGKASQLAAIDYLVSLHSDIFLSASRGNMHNSLAAHRTYLNVRKTIKPDMNLMARLFAHKNLTWPEFRRSVVEGHKNRMGQVALRQPTQSIYTYPAPDCMCTSRRSIAEHSNLDMDLQEAR

SEQ ID NO: 151 - DNA, 1290 bp, Physcomitrella patens
gagctgtgggcaaagccagacagcctggggtataatcagtgtatcgatcgtcctaagaagacagcaaatcctggaggtccaacgaatggatacattctagtgaatgcaaacggcggtttgaatcagatgcgatcgggaatttgtgacatggttgccattgcgaagctgatgaatgccacacttgtcgtccccaaacttgaccatagctctttctgggctgatcctagtgaattcaaggatatcttcgacttgaaacatttcgttgagtcactccgggaggatgtcgacgttatagacactttaccgcttcacctcgctaagatagagcctgcaactaaagcgcccatctcttggtcgaaggtgccttactatgagaaggagcttgtacctttcctgcaggagagcaaggttctgtatttcactcatgcagactctaggctagcaaacaacgatttgcctacccatgtgcagcagttaaggtgtcgagtcaattaccgggcgcttcaatactcagtgcctattcgacaattggcgagcaccttcgctaagcgtttgcatgacgtgagtccttacttagctttgcatcttagattcgagaaggacatgctcgcattcacaggatgtgcacatggtctctccgacaaggaagctgaggagctgaagcagatgcgctacgaggtgaagcattggaaagagaaagagatcgacggagaagagaaacgtaggctgggtggctgccctcttaccccccatgaaacagcgttaatgctgaaagcattagggtatccatcttcgactcaaatttacattgtggctggagaaatttatggacaaggtaccatggatagtctttacaaagaatttccgaaagtatacgatcacactacgcttgcaactgaggcagagcttgcccctttgaaaaagtaccagaaccgacttgctggcctggactacatggtggccttagagagtgacgtgttcgtctacacatacgacgggaatatggccaaggctgtgatggggcaccggcagttcgagggttaccgcaaaacaatcagcccggacagacagcggctagtgaagttgattgatgactatgaagctggttctatcacgtggaaggatttcgaaggtcatgttcgcaaaatccacagcaaccgaacaggagcgccgcattggcggacgccgggagaattgcccaagcttgaggaaaatttctactctaatccttaccctggttgcatttgcaagaaggaatcgcagaaccggcggctgctcaagagaccgtga

SEQ ID NO: 152 - protein, 429 aa, Physcomitrella patens
ELWAKPDSLGYNQCIDRPKKTANPGGPTNGYILVNANGGLNQMRSGICDMVAIAKLMNATLVVPKLDHSSFWADPSEFKDIFDLKHFVESLREDVDVIDTLPLHLAKIEPATKAPISWSKVPYYEKELVPFLQESKVLYFTHADSRLANNDLPTHVQQLRCRVNYRALQYSVPIRQLASTFAKRLHDVSPYLALHLRFEKDMLAFTGCAHGLSDKEAEELKQMRYEVKHWKEKEIDGEEKRRLGGCPLTPHETALMLKALGYPSSTQIYIVAGEIYGQGTMDSLYKEFPKVYDHTTLATEAELAPLKKYQNRLAGLDYMVALESDVFVYTYDGNMAKAVMGHRQFEGYRKTISPDRQRLVKLIDDYEAGSITWKDFEGHVRKIHSNRTGAPHWRTPGELPKLEENFYSNPYPGCICKKESQNRRLLKRP

SEQ ID NO: 153 - DNA, 1248 bp, Physcomitrella patens
agcaacggttaccttgaggtttcaaccaatggtgggctcaaccaaatgcgagctgggatctgcgacatggttgcaatagctaagcttatgaatgtgacattagttgtacctgaactggacaagagttctttgtggggagatcccagtgattttggggatatttttgatacggatcatttcatttcctcgttgaaaagctctgttcgtgtaatcaaggagcttccaaagtctgtcacagacaagattcaggataagaagttgacaaagtattatctgcacccagggagctggtcgaacgagtcttattatgtgaactatatattgccgctgatccaaacgcacactgtggtgcatttcaataaaacggacactaggctagtcaattctgcctctttagagactcaacgactgcgttgctatgtggacttccacgccttaagattcacttcaaatattgaaaaactgggccggaaattggtgaaaatgcttcgcgcgcggggcccatttcttgttttacacttacgctatgaaatggacatgctgtcgttctcagggtgtgccgaaggctgcaccaaggaagaagctgaggaactcacaagcctgaggcactctgtaaactggtggaaagttaaggacattgactcggacgcgagccggaagatgggtctgtgccccctgacacccgaagaaacaactttggtgctaaaggggcttggctatggacgggatacccagttgtacattgcagctggtaatatttacggtggaagcaaacgaatggctgcacttcatgaagcttttcccaacattgtgagaaaggagaagttgctttcagacgctgagctggttccttttaggaaccggtcgtcccaaatggccgctctcgactacttcgtctctatagctagcgatgtgttcattcctacttattatggcaatatggcaaaagttgtggaaggtcatagaagatacttgggttacaagaagacaatcctactcaacaggaaggctattgtagagcagatcgatcaactaaagaacggtacaattaccatgggcgagttctctttggggctcagggaagcccacgaagagcgcactggcacacctttcacaaggcgtcagaatccaggattccccaaagaagaagactacttctatgctaacccgcaagaatgtctgtgtgcccccgatgtacccttcgcctctcgcaaacggttgccacaccctgtccattctttctcctga

SEQ ID NO: 154 - protein, 415 aa, Physcomitrella patens
SNGYLEVSTNGGLNQMRAGICDMVAIAKLMNVTLVVPELDKSSLWGDPSDFGDIFDTDHFISSLKSSVRVIKELPKSVTDKIQDKKLTKYYLHPGSWSNESYYVNYILPLIQTHTVVHFNKTDTRLVNSASLETQRLRCYVDFHALRFTSNIEKLGRKLVKMLRARGPFLVLHLRYEMDMLSFSGCAEGCTKEEAEELTSLRHSVNWWKVKDIDSDASRKMGLCPLTPEETTLVLKGLGYGRDTQLYIAAGNIYGGSKRMAALHEAFPNIVRKEKLLSDAELVPFRNRSSQMAALDYFVSIASDVFIPTYYGNMAKVVEGHRRYLGYKKTILLNRKAIVEQIDQLKNGTITMGEFSLGLREAHEERTGTPFTRRQNPGFPKEEDYFYANPQECLCAPDVPFASRKRLPHPVHSFS

SEQ ID NO: 155 - DNA, 1263 bp, Physcomitrella patens
atgccccagaacaaccacttctttgattcgccatctcgtcatcacctttcaggtctgaatctctggaggaacgtgccacaaacgtcatggaaaccgtgcctgtggtggacgcagagtgcagagcctagaatggctgaagcggggaagatgaatggttacatcataatcgaatgctctgggggcttgaaccaaatgcgacgagacttatgtaatggtattggaattgcgcggttgcttaacgccactatcgtacttccgaggttcgaaacttctccatactggaatgatacgagcgggtttggtgacatatttgacgctgatttctttttggaaagtgtccatagctgggtggatgttttacgggagttgcccacaaatttgtctatgcggcaaccagtagccatcaattgtcacaaagtggcaagcccgtttgattatgttgaatcgctactgccaaagctgttgcagcacacagtcattgttcttcggccatctgccagccagaggtctgaccgttaccctgattctgcaaagagagcgcgatgtcatgcttgctttcgatcactccggcttgtgaggcgtttgcaagaaactgcagacactcttcttgaaagacttccccaccctttcgtggtgctccacctccggttcgagccagacatgattgcgtacagccgctgtcgttacaacctctcaagtgcatccatggcttccataaacagggtccgagggtttcggcaggtatttggagtagcagatgagaagtcttggagaaagaaaggaaagtgcccgttaactccgcaagagacagcattcattctccaggctctgaacatccctgcttccacacctatctacttggctgctggatcagggttacttgagcttcacaagctcgcctccacctacacccagttatttcagaagtcagatttcttacatgccgatcgtctaaaggcattgaaagggagcagaagagctgctattgactggtatgtttcactccatgcttatgcgtacattgcaacatttgtagggaatatggacaagatggtagtgtcagacagggtgttagcaggaaagcatcgcaatctggtcctggacaggcacatgtttgctgaagcatatgggcaggggatgtcagaacaagagatctccaagctcatttggaagaagcataggcatcatgtgacaagtggttatggttcacccgtatcagattgcttctgtagaacttatttgactgcttctcttcaagaatga

SEQ ID NO: 156 - protein, 420 aa, Physcomitrella patens
MPQNNHFFDSPSRHHLSGLNLWRNVPQTSWKPCLWWTQSAEPRMAEAGKMNGYIIIECSGGLNQMRRDLCNGIGIARLLNATIVLPRFETSPYWNDTSGFGDIFDADFFLESVHSWVDVLRELPTNLSMRQPVAINCHKVASPFDYVESLLPKLLQHTVIVLRPSASQRSDRYPDSAKRARCHACFRSLRLVRRLQETADTLLERLPHPFVVLHLRFEPDMIAYSRCRYNLSSASMASINRVRGFRQVFGVADEKSWRKKGKCPLTPQETAFILQALNIPASTPIYLAAGSGLLELHKLASTYTQLFQKSDFLHADRLKALKGSRRAAIDWYVSLHAYAYIATFVGNMDKMVVSDRVLAGKHRNLVLDRHMFAEAYGQGMSEQEISKLIWKKHRHHVTSGYGSPVSDCFCRTYLTASLQE

SEQ ID NO: 157 - DNA, 1530 bp, Physcomitrella patens
gtttgggattctgaaaacgctgaatattactatggatgcatcaaacctagcaagaactactcaagtaggttcgatccaaatatggaagttaatggatatcttctaattgcagctagcggaggcctgaatcagcagagagtagggattacggattctgtggtggttgctcggctcctgaatgccacacttgttgttccgcactttgaccatcgatcatactggaaggatccgagcaattttagtgacatttttgatgtggactggttcatacaatctgtagctcctgacgtgacagtgatcaaagagctgcctcaaactgttagaaaaagtcttccgaagcaggtttataatctacgagtcccacgtaaggtcccagcatggtattattcacgacggattcggcatctccttaaaaggaaacatgttcttcggcttactaaatttgactaccgactggcgaacgagctggaaacagaccttcaaaagttgagatgtcgcacaaactacaaggcactgaggttcacgaaatctcttcaagacataggacaagtgcttgttgacaggatgagggctaagggtaggcgatatattgcattgcatttaagatttgaatctgatatgctagctttttcgggatgctattacggtggcggtgagagagagagacgggatttaggctccatccgcaagcgttggaagtcactacgtcttcaaaaccctgagagagaaagacgcctcgggaaatgccctctgactccagaagaagttggcatcatgctccgtgcactaggttatgggaataacacatatttgtatgtggcatctggtgatgtttacaatggagaagcctctttggcacctctaaaagctttgtttccaaacttctatactaaagagcttttagcaaatcaggtggagttgacaccttttgctaacttctcgtcacgaatggctgcaatagactatatcgtctgttcaagaagtgatgtgtttgtggccaacaataatgggaatatggttcggattttggcgggtgaaagacgtttcaatggccacaagcgaactatcagacccaatgtcaggaagttgggagtgcttttttctgccaggcataatatgtcctgggaagattttgccaagagcgtgagacatcatcaaaagggtttcataggtgaccctatggaggttaaacctggtcgtggtgggttccacgacaaccctgcagcttgtatatgtgaggttccggaagcaaatgagacgctgcggatttggcgggagcagcacgttcagaggcccaaagaaaaggaattgcaagcccaatctgaagtgggttcaagtctagttataccacttgaagacagaagtgatttaatggaagagttcaatgacttgagaggagtgcgcctaagtagtgacacggaggcagctgaggagctacctctgaaagacgaagttgctgatgaagaggagaataccgacggagaaaccgagggagaagctgaaggtgacgatgatggcgacaattactaa

SEQ ID NO: 158 - protein, 509 aa, Physcomitrella patens
VWDSENAEYYYGCIKPSKNYSSRFDPNMEVNGYLLIAASGGLNQQRVGITDSVVVARLLNATLVVPHFDHRSYWKDPSNFSDIFDVDWFIQSVAPDVTVIKELPQTVRKSLPKQVYNLRVPRKVPAWYYSRRIRHLLKRKHVLRLTKFDYRLANELETDLQKLRCRTNYKALRFTKSLQDIGQVLVDRMRAKGRRYIALHLRFESDMLAFSGCYYGGGERERRDLGSIRKRWKSLRLQNPERERRLGKCPLTPEEVGIMLRALGYGNNTYLYVASGDVYNGEASLAPLKALFPNFYTKELLANQVELTPFANFSSRMAAIDYIVCSRSDVFVANNNGNMVRILAGERRFNGHKRTIRPNVRKLGVLFSARHNMSWEDFAKSVRHHQKGFIGDPMEVKPGRGGFHDNPAACICEVPEANETLRIWREQHVQRPKEKELQAQSEVGSSLVIPLEDRSDLMEEFNDLRGVRLSSDTEAAEELPLKDEVADEEENTDGETEGEAEGDDDGDNY

SEQ ID NO: 159 - DNA, 1920 bp, Populus trichocarpa
aaccataactcagcaagcgatggcgtttctcaaagagttaacagccctcgtttctcaggtccaatgactcgccgtgctcactctttcaagcgcaacaacaccagttctaacaacaacagtaatgccggcaacgccaacagcagcaacaatggtagcaacaacgttagtaacggtaacagtaacaatagtattcttagcccccatcttgagattgatctccccttaaactctcctagatctgaaaccgttgatgggtttgaaagggaaagtcacagcaggcagaatctgagccaaagagttcatgggggtgtggttaggattttgacaaataagaaaggtagtattggatctgtgattttggattttgggttcaaggaaaggaagaaacttggccactggatgttctttttcttttgcgggctttgtttgtttctgggtgtttttaagatttgtttatatgggtggtttggatctacccttgaaagagctgcctccaatcaggtacttcatttgattgatgtattcggttccatcacccgacaggaacaagactcttaccgatacatgggatcagaaaatgatcagaaaagaatgataatagaagtaggctcggatgtggttgatagactgaataagaaggctgaattctcaggtatctggtccaagcccaatagtgaaaatttcacccaatgcattgaccagcccggaaatcacaaaaagcttggtgcaaggacaaatggttatattctcataaatgctaatggtggcttaaatcagatgagatttgggatttgtgatatggtagctgtagctaaaattatgaaggcaacgcttgtccttccctcccttgatcacacctcctactgggctgatgatagtggatttaaggatttgttcaattggcaacatttcattgacacgctgaaggatgatgtccatattgtggagaagttgccacctgcctatgatggaattgagccattcaacaaaacactgatatcttggtccaaggttcattattacaaaaccgaggtcctgccattgttgaagcagcacaaagtaatctattttactcacactgattctcgtcttgccaacaatggtctctcagattccatacaaaagttgagatgccgtgctaattatagggcactgaaatattctaaaccaatagaagaacttggaaacaccttggtcagcagaatgagagaaaatggaagccgttatcttgctctccatctgaggtatgaaaaggatatgcttgcatttacaggatgcagccataatttgacagcagcagaagatgaagagctacttaggatgcgatatgaagtcagccactggaaagagaaagaaataaatgggacagaaagaaggttgcttggcaattgcccattgacccctagggagacttcccttttgctcaaaggattgggttttccatccagctctaggatttacttggtagctggtgaagcttatgggactggaagcatgcaataccttttagatgacttcccaaacatcttctcacactccactctctccacagaagaggagctgaatcccttcaaggatcatcagaacatgttggctggtctagactatcttgttgcacttcaaagtgatgtgtttgtctacacttatgatgggaatatggcgaaggcagttcaaggtcataggcgatttgaggagtttaagaaaacaatcaatccagacaagatgaattttgtgaagcttgtggatgagttggatgaaggaaaaatatcttggaagaaattcagttccaaagtgcaaaagcttcacaaagatcgaattggagttccatatgcaagggagcctggagagtttccaaagctggaagaaagtttctttgcaaatccccttcctggatgtatttgtgaaacagcacaagaaaaa

SEQ ID NO: 160 - protein, 640 aa, Populus trichocarpa
NHNSASDGVSQRVNSPRFSGPMTRRAHSFKRNNTSSNNNSNAGNANSSNNGSNNVSNGNSNNSILSPHLEIDLPLNSPRSETVDGFERESHSRQNLSQRVHGGVVRILTNKKGSIGSVILDFGFKERKKLGHWMFFFFCGLCLFLGVFKICLYGWFGSTLERAASNQVLHLIDVFGSITRQEQDSYRYMGSENDQKRMIIEVGSDVVDRLNKKAEFSGIWSKPNSENFTQCIDQPGNHKKLGARTNGYILINANGGLNQMRFGICDMVAVAKIMKATLVLPSLDHTSYWADDSGFKDLFNWQHFIDTLKDDVHIVEKLPPAYDGIEPFNKTLISWSKVHYYKTEVLPLLKQHKVIYFTHTDSRLANNGLSDSIQKLRCRANYRALKYSKPIEELGNTLVSRMRENGSRYLALHLRYEKDMLAFTGCSHNLTAAEDEELLRMRYEVSHWKEKEINGTERRLLGNCPLTPRETSLLLKGLGFPSSSRIYLVAGEAYGTGSMQYLLDDFPNIFSHSTLSTEEELNPFKDHQNMLAGLDYLVALQSDVFVYTYDGNMAKAVQGHRRFEEFKKTINPDKMNFVKLVDELDEGKISWKKFSSKVQKLHKDRIGVPYAREPGEFPKLEESFFANPLPGCICETAQEK

SEQ ID NO: 161 - DNA, 1569 bp, Populus trichocarpa
atgactggcggtggtggacagcagcggaggaaggtaccgcggtcgctagtttgtggtttcatgctgtttggtttgggattgatttctctcttcactggacacgtggcatctgatcttgagtggtactctcaacgactagtcaagcgcagcttcttctactctaggctggaggggaggcgacgcgaaggcattgatatttggaaatcgaagtactcgaatttgttctatggatgtagcgaaagagggcgtaattttccttctgccatacgtgagcgggcttctaatggctatttgcttattgctgcaagtggagggttgaaccaacaaagaactggaataacagatgctgtggttgttgcacggattcttaatgctacattagttgtacccgagttagatcatcgctcttattggaaggatgataggcaaatatgtcgctttgcatgcagtgactttgtcaacatttttgacattgatcggttcatttcttaccttgcaaaagatgtcaccattgtgaaaagggttcctgataaagtcatgcggtcaatggaaaaacccccatataccatgcgtgtcccaagaaaatcccctcctgaatattatctggatcaagttctgccaatattattgaggagacgtgttgtgcagctgacgaagtttgactataggcttgcaagtaaccttgacgaagagctgcaaaagttgcgctgccgggttaattatcatgctttaagatttacaaaacccatacaagaaattggcgagagacttgtgacaaaaatgcgaaagatggcaaaacgttatattgcagttcacttgaggtttgaacctgatatgcttgcattttctgggtgttactttggcgggggtgaaaaggagagatttgagctcggggaaataagaaaaagatgggaaacattacctgatttaagccccgatggagagcgagagagaggaaaatgtccactcactcctcatgaagtaggattaatgctgcgtgcccttggttttgctaacaacacatacctctatgttgcatctggagaaatatatggtggagaagagactctaaggccccttagagaactcttcccaaacttctatacaaaggagatgctagcagttgaagatctaaaaccttttcttccattttcttcccgcctggcggccatcgactacattgcctgtgatgagagtgatgtctttgtcacaaataataatggaaacatggccaagattcttgctggtcgaaggaggtacgctgggcataagaggaccatcagaccaaatgcaaagaagcttagtgcattgttcatggcaagggatcagatgggctgggatacattttccaaaaaggtgaaagcaagccagagaggatttatgggagagccagatgaggtgaggcctggacgaggtgactttcatgaatatccatcttgtatctgtgagaggccattcactgatgatgaaaacagcaaggaagaagaagaaatgggaggaagccacagaaaccatgaggaaagggatatattgtttactttgttctcctttttcataactaggaattga

SEQ ID NO: 162 - protein, 522 aa, Populus trichocarpa
MTGGGGQQRRKVPRSLVCGFMLFGLGLISLFTGHVASDLEWYSQRLVKRSFFYSRLEGRRREGIDIWKSKYSNLFYGCSERGRNFPSAIRERASNGYLLIAASGGLNQQRTGITDAVVVARILNATLVVPELDHRSYWKDDRQICRFACSDFVNIFDIDRFISYLAKDVTIVKRVPDKVMRSMEKPPYTMRVPRKSPPEYYLDQVLPILLRRRVVQLTKFDYRLASNLDEELQKLRCRVNYHALRFTKPIQEIGERLVTKMRKMAKRYIAVHLRFEPDMLAFSGCYFGGGEKERFELGEIRKRWETLPDLSPDGERERGKCPLTPHEVGLMLRALGFANNTYLYVASGEIYGGEETLRPLRELFPNFYTKEMLAVEDLKPFLPFSSRLAAIDYIACDESDVFVTNNNGNMAKILAGRRRYAGHKRTIRPNAKKLSALFMARDQMGWDTFSKKVKASQRGFMGEPDEVRPGRGDFHEYPSCICERPFTDDENSKEEEEMGGSHRNHEERDILFTLFSFFITRN

SEQ ID NO: 163 - DNA, 483 bp, Populus trichocarpa
atgcttgctggtcttggagtcaaacatggaacttacatttatcttgctagttctcatatatatgggggaaaatttaggatgcattcattcactaacctctatcctaacttagtcacaaaggaaactctcctgacacccagtgagcttgcaccttttaggaatttctcttcgcagctagcagcattggattttatcgcctgtgcaactgcagatgtctttgccatgactgattctggaagccaactctcatctctggtgtctggattccgcacttactatggcggtggtcatgctcctaccctgcggcctaacaagaagaggctagcagcaattttgtcagagaatggcaccataggttggaatagttttgaagatagagtaagaaagatgattaaggatggtcagagtgttcgcatacggggttttggtcgaagcatttacagacaaccaaggtgcccagaatgcatgtgtaaaacatactag

SEQ ID NO: 164 - protein, 160 aa, Populus trichocarpa
MLAGLGVKHGTYIYLASSHIYGGKFRMHSFTNLYPNLVTKETLLTPSELAPFRNFSSQLAALDFIACATADVFAMTDSGSQLSSLVSGFRTYYGGGHAPTLRPNKKRLAAILSENGTIGWNSFEDRVRKMIKDGQSVRIRGFGRSIYRQPRCPECMCKTY

SEQ ID NO: 165 - DNA, 1758 bp, Populus trichocarpa
atgaggagaaagaagagagaaaccaaaaggcctaacatacctgccgccgtgctccactggattctctttacgcgtcactacctggttcagtttccgttactcaccgctttcttcggtttcctcctccttctcttcgccgccttcgctttcctctctcctcttcctcctatcatcaaccaccacaaccactcctcacaattaaaaaatggagctaaagcggaagagtcaacgctaagtaaagagacgtcgtcgtttcatgttccgagaagtggagggcgcttagggagtcatttatggagctcaaggtcatcgaagttttactatggctgcagtaacgccagcgagagctttgaaactgctgatacgagaaagaatagtgatcggtacttgttgattgctaccagtggagggttaaatcaacagagaacagggataacagatggtgttgttgcagcttatatcttgaatgctactcttgttgttcctaagctggatcagaagtctttctggaatgatagtagcgattttgctcaaatttttgatgttgactggttcatttcattcctatcaaaagatgttactatcatcaaacagctccatgcaaagggtgggaaagcgctgaatccatataggatgcgggttccaaggaagtgtactcccacatgctatctgacgaaagttttacctgttcttaataagaagcatgttgttcagctcggaaagtttgattacaggctctcgaataggttggacccagatttacagaagctaagatgcagggtcaactaccatgctttaaaattcacggacacaattcttgaaatgggcaaaaaactggttcagagaatgagaatgaagagtgagcacttcattgccctgcacttgaggtttgaacctgatatgcttgcattctcgggatgctattttggcgggggagagaaagaaaggatggaacttggcaagatccggaggaggtggaaaagtttacacgcaagcaaccctgacaaagaacgaaggcaaggaagatgccctctcacaccagaggaagttggtcttatgctgagagctctgggtttcggaagtgatgttcacttatacgtggcttcaggcgaagtatatggaggtgaagagacattagcaccactcaaagctctctttccaaatttccattcaaaagagactttagccagcatgagagagttggcgccattttcatcattttcttctcgaatggctgcactggacttcattgtttgtgatgaaagtgacgttttttctaccaacaacaatggaaatatggccaagatattagctggtcgaaggaggtatttcgggcacaaaccaacaattcgtccaaatgctaaaaaactgtacaaattgttcatgagccggcataacaaaacatgggaagaatttgcctccagggtccgaactcatcaaattggtttcatgggagaaccaaatgaggtgaagcctggcagaggtgagttccatgaaaatccttcatcctgcatatgcgaggattctgcagccaaggctagggcaggtctgactctgactcctcaaaatcgactggatgagggccataaagatggtaaagagaatatcaacaagaatgagactagtgatgtgactgatgagctatcaatagaggatgatcaggatttgactgacatggattatgtggacaatggaacagcggttaaaggtaaaggtctgcctggtgaaatgcttttggaggaattcttttccgactga

SEQ ID NO: 166 - protein, 585 aa, Populus trichocarpa
MRRKKRETKRPNIPAAVLHWILFTRHYLVQFPLLTAFFGFLLLLFAAFAFLSPLPPIINHHNHSSQLKNGAKAEESTLSKETSSFHVPRSGGRLGSHLWSSRSSKFYYGCSNASESFETADTRKNSDRYLLIATSGGLNQQRTGITDGVVAAYILNATLVVPKLDQKSFWNDSSDFAQIFDVDWFISFLSKDVTIIKQLHAKGGKALNPYRMRVPRKCTPTCYLTKVLPVLNKKHVVQLGKFDYRLSNRLDPDLQKLRCRVNYHALKFTDTILEMGKKLVQRMRMKSEHFIALHLRFEPDMLAFSGCYFGGGEKERMELGKIRRRWKSLHASNPDKERRQGRCPLTPEEVGLMLRALGFGSDVHLYVASGEVYGGEETLAPLKALFPNFHSKETLASMRELAPFSSFSSRMAALDFIVCDESDVFSTNNNGNMAKILAGRRRYFGHKPTIRPNAKKLYKLFMSRHNKTWEEFASRVRTHQIGFMGEPNEVKPGRGEFHENPSSCICEDSAAKARAGLTLTPQNRLDEGHKDGKENINKNETSDVTDELSIEDDQDLTDMDYVDNGTAVKGKGLPGEMLLEEFFSD

SEQ ID NO: 167 - DNA, 1287 bp, Populus trichocarpa
cccaactgtaccaaactatggaagcctccaccaaatcgcaattatttgccttgtactcaacctagtcctaactatacttctccttcagagtcgagaggttaccttctagctcatacaaatggagggctcaaccagatgcgagctgggatatgtgatatggtagctattgcacatatcataaatgccactcttgttgttccaaaactagataaaaagtcatattggcaagattccagcaacttttcagatgtctttgatgaagatcattttatcaatgctctagctaatgatgtgaaagtcattaaaaagcttcccaaggaaataggtagttctatgaaagcagttaaatattttaaaagctggtctggtatggactactaccaggaagagatagcaagcatgtgggctgattataaggttattcgggctgccaagactgactctcgcctagcaaataacaatctccctcctgatattcagaagctgcgttgccgtgcctgttatgaagccctccgttttgcacctcaaattgaagcaatgggaaagttgttggtggaccgcatgaggtcatatggtccttatatttccctgcacttacgatatgagaaggacatgcttgccttcagtggatgtacacatgatttgtctcctgctgaagcaaatgaactaaaaatgatacgagacgcaaatgataactggaaagtgaaggatattgatcccagggagcagagatccaagggtttttgccccttaactccaaaggaggctgcaatatttctatctgctcttggttacccatcaaatacccctatctacattgccgcaggagagatatatggaggtgattcacatatgggtgatctacaatcccgatatcctatgttgatgcgcaaggaaacgttggcatcttttgaggagcttgaaccatttaccaatcacttgtctcagctggctgcgcttgactatattgtatctgttgaaagtgatgtattcatgccgacatactctggaaacatggcaagggcagtcgaaggtcatcgtcgctttcttggacatagaagaacaatttccccggacaggaaagcacttgttcgtctgtttgataaaattgagcagggaaaactgaaagaaggcaaatatttatcagaccatgtcattgaaagccacagaaaacggcaaggctccccaaggaagaggaaaggccccatttctggaacaaagggcacagataggtttcgttcagaagaagctttttatgtaaatcctttaccagattgtttatgtcag

SEQ ID NO: 168 - protein, 429 aa, Populus trichocarpa
PNCTKLWKPPPNRNYLPCTQPSPNYTSPSESRGYLLAHTNGGLNQMRAGICDMVAIAHIINATLVVPKLDKKSYWQDSSNFSDVFDEDHFINALANDVKVIKKLPKEIGSSMKAVKYFKSWSGMDYYQEEIASMWADYKVIRAAKTDSRLANNNLPPDIQKLRCRACYEALRFAPQIEAMGKLLVDRMRSYGPYISLHLRYEKDMLAFSGCTHDLSPAEANELKMIRDANDNWKVKDIDPREQRSKGFCPLTPKEAAIFLSALGYPSNTPIYIAAGEIYGGDSHMGDLQSRYPMLMRKETLASFEELEPFTNHLSQLAALDYIVSVESDVFMPTYSGNMARAVEGHRRFLGHRRTISPDRKALVRLFDKIEQGKLKEGKYLSDHVIESHRKRQGSPRKRKGPISGTKGTDRFRSEEAFYVNPLPDCLCQ

SEQ ID NO: 169 - DNA, 1743 bp, Populus trichocarpa
atgaaaaataaaccttacaatgttgtcagtagcgagggaagcggtggagacggaaatcctcctagttcaccaccatcgccacggcgtcagacaagcggtttctctcaatgtcgtcggcggctccgctcgaaggttcccttacagtatttccgcaaatacagcttagctgccgggatttttggccggcggaacatacagttcctgctgcttctgttctttctctacttttctggcttgatgatgtgcgtgggccggttctccaatttcttgcgtcactctcgtgagcctattgcgatctataaaagccatctattgttagagaagttttggcatgatatcgagactgacaattctactgctcttgagttatcttctgtttggcaattcaaaaggagaatgagagtgcagaaaccttgtcccgtgtcaactgctagacggcatttgggctcggttgaagtgtcatctgaaccaaccggttacttaatcgttgaggcaaatggcggtctgaaccaacaacgctctgcgatctgcaatgcagttgccgtagctggaattttgaatgcagtgctggtcatccctagttttggttacaacagtgtctggaaggatccaagcgagttcagagacatttatgatgaagatcattttatagccactcttgagggttatgtgaaagtggttaaagagttgcctaatgaattgatatcaagatatgaccacaatattactaatattccacacctccgtgttgaaggatgggctcctgctaaacattatttaggaaaagtttatcctgtcctgcaggagcatggggtcatccgcattgcaccctttgccaatagattggcaatgaatgtcccatctcatattcaattgctcaggtgcataacaaattatagagcattgaggttctcttctcctataacaacagtagcacagaaattactaaaccgaatgattgagaggagctcaatgactggtggaaaatatgtttctgttcaccttcgatttgaggaggacatggtggccttctcatgctgtttgtatgatggaggagatgctgaaaagtttgaaatggattcatttcgtgaaaaagggtggaaagggaagtttaaaaaaaaagatcttgactttgtagctggtcgtaatcgtattgatggaaaatgccctctgacccccttggaggtagggatgatgctgcgcggcatgggattcgataacaacacttcaatttatttagcctcagggaaactttacaaagcagaacaaaatttagctcctttgttgaagatgtttccccttctttacaccaaggaatctcttgcaacctctgacgagcttgctccatttcagggctactcttcaaggctagcagctttggactacactgtatgtttgttcagtgaggttttcgtgacaactcaaggaggaaacttcccacattttctgatgggtcaccgcagattcctttttaatgggcatgcgaagaccattaaacccgataaacgcatgcttgttggtctactagaaaacatgacaatcagctggaaggacttcaaggatgatatggatgcaatgctccttgaaagcgatcgcaagggaatgatgattccaagagtcagaaaattcaacagaaaaaattcaatctacacattccccttgccagaatgtgactgtctccaatcacacgactcctcacttgggctaaaccatactcttaatgctcttgaacccccaagatga

SEQ ID NO: 170 - protein, 580 aa, Populus trichocarpa
MKNKPYNVVSSEGSGGDGNPPSSPPSPRRQTSGFSQCRRRLRSKVPLQYFRKYSLAAGIFGRRNIQFLLLLFFLYFSGLMMCVGRFSNFLRHSREPIAIYKSHLLLEKFWHDIETDNSTALELSSVWQFKRRMRVQKPCPVSTARRHLGSVEVSSEPTGYLIVEANGGLNQQRSAICNAVAVAGILNAVLVIPSFGYNSVWKDPSEFRDIYDEDHFIATLEGYVKVVKELPNELISRYDHNITNIPHLRVEGWAPAKHYLGKVYPVLQEHGVIRIAPFANRLAMNVPSHIQLLRCITNYRALRFSSPITTVAQKLLNRMIERSSMTGGKYVSVHLRFEEDMVAFSCCLYDGGDAEKFEMDSFREKGWKGKFKKKDLDFVAGRNRIDGKCPLTPLEVGMMLRGMGFDNNTSIYLASGKLYKAEQNLAPLLKMFPLLYTKESLATSDELAPFQGYSSRLAALDYTVCLFSEVFVTTQGGNFPHFLMGHRRFLFNGHAKTIKPDKRMLVGLLENMTISWKDFKDDMDAMLLESDRKGMMIPRVRKFNRKNSIYTFPLPECDCLQSHDSSLGLNHTLNALEPPR

SEQ ID NO: 171 - DNA, 1725 bp, Populus trichocarpa
atggcatttcaccggcggcgcaaccactactacaaacgtttccggtctgttctgcctttaatatccgctgtttccggagttcttctcattctctttggtcttctcacatttctcgctcctgcaccgattgatactaacaatccccatcataagaacttgatgtacactgcaaatgatgttgttgaagatacgattggaaagcctggagaacctgttcttcacataccgataaaagggaggaaggatcgtgatgtttggagctcgagaaactcgaaatatttctatggatgcagtaatgctagcaacaagtttccgaatgctgatgcgattacacatcccaatcggtacttgctgattgctaccagtggaggcttaaatcagcaaaggactgggattacagatgctgttgttgctgctcgtattttgaatgctactcttgttgttccaaagctagatcagaagtctttttggaaagattcaagtgatttttcagagatttttgatgttgattggtatatttcttctctggcaaatgatgtcaaaatcattaaatctctcccaagaaggagagggaaaacttggattccgcgtaatatgcgtgttccaaggaagtgtagtgagagatgttatcaaaatcgtgtattacctgttcttttaaaaaggcatgcaattcagctcacaaagtttgattatagactcgcaaataagttggatacacaattgcaaaagttgagatgtagagtcaattaccatgctttaaagtttacggatcctattcttcgaatgggtgagaaattggtccatcgaatgcggatgaaaagcaagcatttcattgccttgcacctgaggtttgaacctgatatgctggcattctctggatgctattatggtggaggtgacaaggaaaggaaggaacttggtgcaataaggaagaggtggaaaactttacatgcaagtaaccctgataaggaaaggaggcatggaaaatgcccgctaactccaaaagaagttggccttatgttgagagcactgggttatggaagtgatgttcatatttacgtggcatctggagaagtgtatgatggggaagatacattggcacccttaaaagcactcttcccaaacttctatacaaaagagactttagccagcaaggaggagctggaaccattttcttcattttcttcaagaatggctgcacttgacttcattgtttgtgatgaaagtgatgtgtttgttaccaacaacaatggtaatatggctaaaatattagctggacgaaggagatattttggacacaaacctaccattcgtccaaatgctaaaaaactgtatagattgttcttgaaccaaactaccatgtcatgggaagcatttgcctctaaaatgcgtactttccagaggggcttcatgggggagccaaaagaagtcaggccaggcaggggagagtttcatgagaacccacacacctgcatttgtgaagattctgaagccaaggcaaagaaaaactcaggacctagaaaatatgggaaggggtatgacgcactgggagatgatataccaagtgactatcagaatgttgatgatgagccagaattgcctgatcctgatgatgatggagaccaagatggtcctcaagagaaaggtcagttcaatgaaaccggtatggattatgatgaattgaccaatgaagaacctgagttggaagaaattctttcagactag

SEQ ID NO: 172 - protein, 574 aa, Populus trichocarpa
MAFHRRRNHYYKRFRSVLPLISAVSGVLLILFGLLTFLAPAPIDTNNPHHKNLMYTANDVVEDTIGKPGEPVLHIPIKGRKDRDVWSSRNSKYFYGCSNASNKFPNADAITHPNRYLLIATSGGLNQQRTGITDAVVAARILNATLVVPKLDQKSFWKDSSDFSEIFDVDWYISSLANDVKIIKSLPRRRGKTWIPRNMRVPRKCSERCYQNRVLPVLLKRHAIQLTKFDYRLANKLDTQLQKLRCRVNYHALKFTDPILRMGEKLVHRMRMKSKHFIALHLRFEPDMLAFSGCYYGGGDKERKELGAIRKRWKTLHASNPDKERRHGKCPLTPKEVGLMLRALGYGSDVHIYVASGEVYDGEDTLAPLKALFPNFYTKETLASKEELEPFSSFSSRMAALDFIVCDESDVFVTNNNGNMAKILAGRRRYFGHKPTIRPNAKKLYRLFLNQTTMSWEAFASKMRTFQRGFMGEPKEVRPGRGEFHENPHTCICEDSEAKAKKNSGPRKYGKGYDALGDDIPSDYQNVDDEPELPDPDDDGDQDGPQEKGQFNETGMDYDELTNEEPELEEILSD

SEQ ID NO: 173 - DNA, 1680 bp, Populus trichocarpa
agtcttagcggctcttccactactggcgggccccaccactttcatcataattaccattgtcataaccatagccaccgccaccaccccttgataaagtatcttctgcttcgcaggaagtttttcttttttgttccggagtcgtggctgcttggggtggaggatttgacggctaccatttcacgtggtttgagatccggcaagaacatgggtcgtaggatttttggtgttttaatggtaatggcggttttgtcggtttttctgaaggtctcgttttggagtcaaacggagagaaatattcatgaaaatagtaatttagttattttcagacattttaaagatgattgggctagggctcaacgttctatcatcgaacaccacccttccatttccactccccttctccacaagcttcctcctattccaaaaatctggatgaaacccaatagcgacgacttttatcagtgcatacctccgccaagaaatcaaataagtgcgtccaggaaaacaaatggttaccttcttgttcatgcgaatggtggattgaatcaaatgagaactggaatttgtgatatggttgcagctgctatgttaatgaatgcaactcttgttcttcctgctcttgatcgtgaatcattttggacagatccaagcacttttaaagacatttttgactggaggcactttatggaagcgttaaaagatgatattgatgtagttgagtatttgccatcccagtatgcagccaagaagccccatgaaaaggcacctgtctcgtggtctaaggccaattactacagagtggagatggctacattgttaaagaagtacaaagttttaaggtttacccacagtgattcacggctggctaataatggccttgcagctcacatccagaggctaaggtgccgtgccaattacaaggctctccggtatgcaaaggagattgaggatcttggaaagaaattggttgatagactaagaaataaaagcgagccatatgttgctctgcatttaagcagatatgagaaagacatgcttgccttcactggctgcagccacaaccttaccgcagaagaggctgaagagctcagagttatgaggtacaagacttcgcattggaaggagaaggagatagatagtaaaacacgacggctccaagggggttgtccgatgactcccagagaagcagctatatttctaaaggctatgggctacccatcctctacagctatctatatagttgcagggccatcatacggaagcggtagcatggcacccttccttgcagagttcccaaatgttttttctcattttaatctagcaacatcggaagaattagaacctatcaagccatatcaaaatcgtctcgctgccttggattatattgtggcacttgaaagtgacgtctttatttatacatatcatggaaatatggccaaagctgtgcaggggcataggaggtttgaaggatttcgaaagactataaatccagacaaacgaaattttgtcgtgctgattgatcagttggacgacggtgcattatcctgggaagaattctctttgcaggttcagagtttacattcagacaggattggagctccataccagaggcaggcaggctcatcaccgaaggaggaagagaacttttatgcaaatcctcttcctggatgtgtatgcaac

SEQ ID NO: 174 - protein, 560 aa, Populus trichocarpa
SLSGSSTTGGPHHFHHNYHCHNHSHRHHPLIKYLLLRRKFFFFVPESWLLGVEDLTATISRGLRSGKNMGRRIFGVLMVMAVLSVFLKVSFWSQTERNIHENSNLVIFRHFKDDWARAQRSIIEHHPSISTPLLHKLPPIPKIWMKPNSDDFYQCIPPPRNQISASRKTNGYLLVHANGGLNQMRTGICDMVAAAMLMNATLVLPALDRESFWTDPSTFKDIFDWRHFMEALKDDIDVVEYLPSQYAAKKPHEKAPVSWSKANYYRVEMATLLKKYKVLRFTHSDSRLANNGLAAHIQRLRCRANYKALRYAKEIEDLGKKLVDRLRNKSEPYVALHLSRYEKDMLAFTGCSHNLTAEEAEELRVMRYKTSHWKEKEIDSKTRRLQGGCPMTPREAAIFLKAMGYPSSTAIYIVAGPSYGSGSMAPFLAEFPNVFSHFNLATSEELEPIKPYQNRLAALDYIVALESDVFIYTYHGNMAKAVQGHRRFEGFRKTINPDKRNFVVLIDQLDDGALSWEEFSLQVQSLHSDRIGAPYQRQAGSSPKEEENFYANPLPGCVCN

SEQ ID NO: 175 - DNA, 1407 bp, Populus trichocarpa
ggagttcttgctgccctcttgctgttgatttttcctgccttttattctccattcgctcatgcctctccttctgtcctgtcggaatggaatgctcctaaacctaggcacctacctctgctgaagagtgccttgcagcttccaacttcaaatgaaaagcagtctgatctctggactcctttggatgatcaaggatggagaccttgtgctgacagcatatgtgatgcggttgctgttgctaaaatactcaatgcgacacttgtcatcccacattttgaagtcaatcctgtttggcaagattcaagctctttcatggatatatttgatgtggatcactttattaatgtcttaaaggatgacatttctatagttaaagaactacctgatgaattctcctggagcacgagggagtattatgccatagctattcgagctacccgaattaagatggcacctgtccatgcttcagctaactggtatctagagaatgtctcgcctgtgctgcagagttatgggattgctgcggtttccccattctctcaccgcctgtcctttgataacttgccgatggacatccagcgtctacgttgtaaagtcaattttcaagcactagtttttgttccacatattcgagcacttggagatgctcttgtcagtcgcctcagacatccttacaagaatggagcacctggtgccagctacctacaggaatccactgatgtgattgataaagatagtgcagggaagtttgttgtgctacatcttcgttttgacaaggatatggctgctcattcagcctgtgattttggtgggggaaaagctgaaaagttggctctggccaagtaccgacaagtgatttggcagggaagagtccttaactcccaattcactgatgaagagttgaggagtcaggggcgctgtccattgactccagaagagatcgggttgctgctagcagctttgggctttgacaatagcactcgtctatatctagcttcccataaggtttatggtggagaagctaggatttcaactttacgaaaattgtttccactaatggaagacaaaaaaagtcttgcctcttcagaggaacgatcacagatcaaaggaaaggcttctctgttagctgcagttgactactatgttggcttgcacagtgacatcttcgtctctgcttctccaggaaatatgcacaatgctctggttggacaccggacttataaaaacttgaagaccataaggccaaatatggctttgttaggccaactgttccttaacaaaaccattagttggacagacttccagcaagcggtcgttgaagggcatgaaaacagacaagggcagatcaggctaagaaaaccaaagcaatctatttatacttatcctgctcctgattgcatgtgctatgct

SEQ ID NO: 176 - protein, 469 aa, Populus trichocarpa
GVLAALLLLIFPAFYSPFAHASPSVLSEWNAPKPRHLPLLKSALQLPTSNEKQSDLWTPLDDQGWRPCADSICDAVAVAKILNATLVIPHFEVNPVWQDSSSFMDIFDVDHFINVLKDDISIVKELPDEFSWSTREYYAIAIRATRIKMAPVHASANWYLENVSPVLQSYGIAAVSPFSHRLSFDNLPMDIQRLRCKVNFQALVFVPHIRALGDALVSRLRHPYKNGAPGASYLQESTDVIDKDSAGKFVVLHLRFDKDMAAHSACDFGGGKAEKLALAKYRQVIWQGRVLNSQFTDEELRSQGRCPLTPEEIGLLLAALGFDNSTRLYLASHKVYGGEARISTLRKLFPLMEDKKSLASSEERSQIKGKASLLAAVDYYVGLHSDIFVSASPGNMHNALVGHRTYKNLKTIRPNMALLGQLFLNKTISWTDFQQAVVEGHENRQGQIRLRKPKQSIYTYPAPDCMCYA

SEQ ID NO: 177 - DNA, 1479 bp, Populus trichocarpa
gttagatctgagagtggagtaaggagcgagaaaatagcagcgccggtggctccagtcattgctagaactaagcgattacaagtttggtttatcagggtttgttccagtattcttttatggacctgtttggttcagcttcttacggttggagagttatggcactccagttttatcaatatcatcgccccctccgttaaacatcctcctcttcccctccttccccttagaaactatacaagcaatggttatcttaaagtgtcctgcaatggtggcttgaatcaaatgcgatccgcgatctgtgacatggtggctgtcgccaggcttttgaatctcactttggttgttccagaacttgataaaacatctttctgggctgacaataggtattttttctattctttctgcagtacttttgaggacatatttgatgtgaaacatttcattgagtcactaagagatgaaattcgaattgtcagaaggcttccaaagagatttagtagtaaatatggatacaaagtatttgagatgcccccggttagctggtccagcgaagaatactacctgcaacagatcttgccacttttcagtaaacaaaaggtgttgcacttcaataaaacagatgcacgtttggcaaacaacggggtttcaattgatcttcagaaagtcaggtgccgtgttacttttcaggcactgaaattcactccagagattgaatctttggggtacaaattggttcgtgttctacacgaaagggggccttttgtggctttgcatatgagatatgagatggacatgttggctttctcaggttgtacccatggctgcaccaaggaagaagctgaggagctcaagcagttaaggtatgcatacccttggtggagagagaaagagatagtttctgaagagaggagatcacaaggtttgtgcccattgactcctgaggagacagcgttgattttgcaagcactgggttttgacaaggacacacagatatatattgcagctggtgagatatatggcagtgagcggagacttgcggtgctaagagctgcttatccaaggactgtgagaaaggaaatgctattagattcaggggagctgcagcaattccagaaccattcatcacaaatggctgcactcgatttcatggtctcaatagccagtgacactttcatccccacctatgacggaaacatggcaaaagttgtggaaggtcaccgcaggtatcttgggtttaagaagactgtcctgctagaccgaaaaagacttgtggagttaatggatttgcatcagattgggacacttacatggaatgagtttgtatttgctgttcgatcagcacatgagaagaggatgggaaagccaactcgacgtagggttattgcagataaaccaaaagaggaagattatttttacgcaaaccctcaagagtgcctttgtgagggaacaagctgtgatgatttattaggacctggtaat

SEQ ID NO: 178 - protein, 493 aa, Populus trichocarpa
VRSESGVRSEKIAAPVAPVIARTKRLQVWFIRVCSSILLWTCLVQLLTVGELWHSSFINIIAPSVKHPPLPLLPLRNYTSNGYLKVSCNGGLNQMRSAICDMVAVARLLNLTLVVPELDKTSFWADNRYFFYSFCSTFEDIFDVKHFIESLRDEIRIVRRLPKRFSSKYGYKVFEMPPVSWSSEEYYLQQILPLFSKQKVLHFNKTDARLANNGVSIDLQKVRCRVTFQALKFTPEIESLGYKLVRVLHERGPFVALHMRYEMDMLAFSGCTHGCTKEEAEELKQLRYAYPWWREKEIVSEERRSQGLCPLTPEETALILQALGFDKDTQIYIAAGEIYGSERRLAVLRAAYPRTVRKEMLLDSGELQQFQNHSSQMAALDFMVSIASDTFIPTYDGNMAKVVEGHRRYLGFKKTVLLDRKRLVELMDLHQIGTLTWNEFVFAVRSAHEKRMGKPTRRRVIADKPKEEDYFYANPQECLCEGTSCDDLLGPGN

SEQ ID NO: 179 - DNA, 1710 bp, Populus trichocarpa
atgcacgcgtacaatagaatacctagcagcggccactcaacaccctcaccacctcaatcgccgctccgttcacctaggtaccgtcacggcagtggaggaggaggccggtccaagcctggccggttcactccttcctcctatccgcctggacgtaacctcgcacaccgcctcgcctggttcctcctctccgtcctcctccgtcgccaggggattttccttttcgctcctctcatttatatttctggtatgcttttgtacatgggaacggtgtcgttcgacgttggccctataattgaccataagcctgctcccggttcggtttatcggagccctcagatttacgagaagcttcgaccggaaatggatgccgataattcatctgccgatgcgctatcaactgtgtggaaaaactcgtataaaagtggtgagtggaggccgtgcataaacaaatcttccgaaggcttacctgaatcaaatggttatatctatgttgaggcaaatggtggcctgaatcagcagaggacttcgatatgcaatgcggttgctgtggcgggctatcttaatgcaactctactcattcctaactttcattatcatagcatctggagagatcctagcaaattcaaagacatctatgatgaggactattttatcagtacattggaaaatattgtaagggtggttgataagattcctggataccttatggagcgttatgataacaacatgactaatgtccataactttagagtaaaagcatgggcacccgttcagtattacagggatgttgtccttccaaggctattagaagaaagggtcataaggatttctccttttgcaaatcgcttgtcatttgatgttcctccagctgttcaacggcttagatgtttggcaaattatgaagctttaaggttttcaaatcccatattaactatgggagaaacattggttgcaagaatgaaagaacgcagtgcgagccatggtggaaagtatgtttctgtccatcttcgctttgaggaggacatggttgctttctcatgctgtgtatttgatggtggatggcaagaagctaaagacatgaaagcagcgagggaaagaggttggaaaggaaagtttacaaagcctggtcgaactatacgtcctggggcaattaggctcaatgggaagtgtccccttactccgttagaggttggattgatgcttaggggcatgggttttgataaaaacacgtatatctttttggcatctggaaagatttacaattctgaaaaatacatggccccactgttggaaatgtttccgaatctgttaactaaagatatgctggcattggaagacgaacttgatccgttcaagaattattcttctaggatggctgcgatagactacacggtgtgtcttcacagtgaggtatttgtgacaactcaaggtggcaacttcccccattttttgatgggccatagaagattcttgtatggtggacactcaaagacgatcaggccagacaagcgaaagttagcaatgctctttgataatctgaaaatcgattggaagagcttcaagcgacacatgctgaatatgcggtctcacagtgattctaaaggatttgaaatcaaaaggccaaatgactccatatattcctttccgtgcccagattgcatgtgccatgttaacagaacagaagattcaagatcatcttcagctacgtga

SEQ ID NO: 180 - protein, 569 aa, Populus trichocarpa
MHAYNRIPSSGHSTPSPPQSPLRSPRYRHGSGGGGRSKPGRFTPSSYPPGRNLAHRLAWFLLSVLLRRQGIFLFAPLIYISGMLLYMGTVSFDVGPIIDHKPAPGSVYRSPQIYEKLRPEMDADNSSADALSTVWKNSYKSGEWRPCINKSSEGLPESNGYIYVEANGGLNQQRTSICNAVAVAGYLNATLLIPNFHYHSIWRDPSKFKDIYDEDYFISTLENIVRVVDKIPGYLMERYDNNMTNVHNFRVKAWAPVQYYRDVVLPRLLEERVIRISPFANRLSFDVPPAVQRLRCLANYEALRFSNPILTMGETLVARMKERSASHGGKYVSVHLRFEEDMVAFSCCVFDGGWQEAKDMKAARERGWKGKFTKPGRTIRPGAIRLNGKCPLTPLEVGLMLRGMGFDKNTYIFLASGKIYNSEKYMAPLLEMFPNLLTKDMLALEDELDPFKNYSSRMAAIDYTVCLHSEVFVTTQGGNFPHFLMGHRRFLYGGHSKTIRPDKRKLAMLFDNLKIDWKSFKRHMLNMRSHSDSKGFEIKRPNDSIYSFPCPDCMCHVNRTEDSRSSSAT

SEQ ID NO: 181 - DNA, 300 bp, Populus trichocarpa
atgcagaccagcaaccctgacaaagaacacaggcaagaaagtgaagtatatggaggtgacgagacattagcatcgctcaaagctctcttcccaaatctccattcaaaagaagctttagccaacaagagagagttggcgccattttcatcgtcttcttctcgaatggctgcaccagattttattgtttgtgacgaaggtgatgtttttttctaccaacaacaatggaaattaaatatgccccagatattagctggtcaaagatggcttagcctatttccagttgcaaatacaaattattga

SEQ ID NO: 182 - protein, 99 aa, Populus trichocarpa
MQTSNPDKEHRQESEVYGGDETLASLKALFPNLHSKEALANKRELAPFSSSSSRMAAPDFIVCDEGDVFFYQQQWKLNMPQILAGQRWLSLFPVANTNY

SEQ ID NO: 183 - DNA, 1404 bp, Populus trichocarpa
atgaaggtgtggatgataagggcaacgacgtcggttttgttgtggacatgtgtggttcagttgacgacaatcggtgagatgtggggtcctagggttttgaaaggttggccttcccaatctgcctctgccgccttgcaagagaatgttccttctctccctgctcgcgttttgcctccaaagagggtttataagaacaatggatacttaatggtctcgtgcaatggaggtcttaatcaaatgagagctgcgatatgcgatatggttgctattgctagatatttgaatgttacacttatagtaccggaactggataaaacctccttttgggctgatcccagtgagttccaagacatatttgatgtggagcattttatcacatcattaagggatgaggttcgcgtattgaaagaattgccttccaggctgaagcagagagtggaactggggatgacttataccatgccaccagttagttggtcggatatttcttactattataaccagattcttcctttgatacagaagtacaaagttgtacatctaaataaaactgatgctcgacttgccaataatcaccaacctctagagctgcagaagttgcgctgccgtgtgaatttttttgctctgagattcaccactcaaatagaggagttgggtaagagagttataaggcttctaaggcaaaatggtcccttcttggtactccaccttcgatatgaaatggacatgctggcgttttctggctgtactcaaggttgcaacgatgaagaggtggaagaattgacaagaatgagatatgcttatccttggtggaaagaaaaaataataaattcggatttgaagaggaaagatgggttgtgtcctttgacacctgaggaaacagctctcacgttgagggcactggacattgatccaaatatgcaaatatatgttgcagctggtgaaatatatgggggtgataggagaatggcaagtcttgctgcatcttatccaaaactggtcagaaaggaaacactgttggaaccatcagaccttaggttcttccagaatcactcatctcaaatggcagcattggattatcttgttgcattggagagtgatatttttgtccctacctatgatggaaacatggctaaagttgttgaaggccaccgcagattccttggctttaagaaaacaattttactggacagaaggcttttggttgatctgatagatcgatacactaatggatcgctgacctgggatgaattttcgtattatgtaaaagaatcccatgcagatcggatgggcggcccaacaaaaaggctggtgatccttgacaggcctaaagaagaggattacttctattcaaacccagaagagtgtttgcagtcatcagaggatccattgagcagcacatga

SEQ ID NO: 184 - protein, 467 aa, Populus trichocarpa
MKVWMIRATTSVLLWTCVVQLTTIGEMWGPRVLKGWPSQSASAALQENVPSLPARVLPPKRVYKNNGYLMVSCNGGLNQMRAAICDMVAIARYLNVTLIVPELDKTSFWADPSEFQDIFDVEHFITSLRDEVRVLKELPSRLKQRVELGMTYTMPPVSWSDISYYYNQILPLIQKYKVVHLNKTDARLANNHQPLELQKLRCRVNFFALRFTTQIEELGKRVIRLLRQNGPFLVLHLRYEMDMLAFSGCTQGCNDEEVEELTRMRYAYPWWKEKIINSDLKRKDGLCPLTPEETALTLRALDIDPNMQIYVAAGEIYGGDRRMASLAASYPKLVRKETLLEPSDLRFFQNHSSQMAALDYLVALESDIFVPTYDGNMAKVVEGHRRFLGFKKTILLDRRLLVDLIDRYTNGSLTWDEFSYYVKESHADRMGGPTKRLVILDRPKEEDYFYSNPEECLQSSEDPLSST

SEQ ID NO: 185 - DNA, 1239 bp, Populus trichocarpa
gagttttgggagcaaccggatggaaaagggtacaagccatgcttggattttagtctcaagtatcgaaaggcatctgcgagaatttcaaaggagagaaggaggttcttggtggtggtagcctccgggggattgaaccagcagaggaatcagattgttgatgctgttgtcattgcaagaattcttgaagcagctttggttgttcctgttttgcaggttaatccaatttgggacgatgagagtgaattctcggagattttcaatgttgagcatttcaagagagttttacgagctgatgtacgaattgtatcgtcccttccctccacacatttgatgtcaaggcagtccattgaaaaccaaattccttatgatgtttcaccgtattggattcgtgccaggttctccagactgctgaatgaagaaggccttcttattctaaaagcattagactccaaactttccaagaatcttccccctgatctgcagaagctgcgatgcaaggttgccttccatgcattgagatttgcagcaccaatacaggatcttgggaacaggctttcaaagagaatgtggattgaaggtccatatattgccctccatctcaggttagagaaggatatctgggtcagaagtggatgtctcagcagtttaggcccagaatatgacaaaatcatcgccaaatcacgggagtctcagcctgaataccttacaggaaggttgaacatgaaccatatccggcgaagacttgccggcctatgtccccttagtgcactagaaattgcaaggtttttaaaggctttaggagcaccaagcactgctcgaatatacattgctggaggagagccatttggtggcagcctggctctgcaaccactgattgccgaattcccaaacgtaataacaaaggagatattggcaagaggaggtgaactgtcaccatttatcaagaaggcctcagctctggctgctatagactacatcatctcattaagcagcaacgtctttataccttcccatggaggaaacttcggtcgagtcatgcagggtcaccgtgcttatgctggtcataagaaacacataaggcctaacaagcgagccatgcttcccgtattcgaaaactccacctttgaattcggaagcatcatcaggacgctgcacaagaaatctcagggccaacctgagccaaggactaacaagagagaccgagatgtgattgcatatccagttcctgaatgtatgtgc

SEQ ID NO: 186 - protein, 413 aa, Populus trichocarpa
EFWEQPDGKGYKPCLDFSLKYRKASARISKERRRFLVVVASGGLNQQRNQIVDAVVIARILEAALVVPVLQVNPIWDDESEFSEIFNVEHFKRVLRADVRIVSSLPSTHLMSRQSIENQIPYDVSPYWIRARFSRLLNEEGLLILKALDSKLSKNLPPDLQKLRCKVAFHALRFAAPIQDLGNRLSKRMWIEGPYIALHLRLEKDIWVRSGCLSSLGPEYDKIIAKSRESQPEYLTGRLNMNHIRRRLAGLCPLSALEIARFLKALGAPSTARIYIAGGEPFGGSLALQPLIAEFPNVITKEILARGGELSPFIKKASALAAIDYIISLSSNVFIPSHGGNFGRVMQGHRAYAGHKKHIRPNKRAMLPVFENSTFEFGSIIRTLHKKSQGQPEPRTNKRDRDVIAYPVPECMC

SEQ ID NO: 187 - DNA, 1260 bp, Populus trichocarpa
atttggatgaaacccaatagcgacaacttttacaagtgtatagctccggcaagaagtcaaacaagtatgaaaacaaatggttaccttcttgttcatgcgaatggtggattgaatcaaatgagaacaggaatttgtgatatggttgctgctgcaaagttaatgaatgcaactcttgttcttccttctcttgatcgtgaatcgttttggacggatccaagcacttttaaagacatttttgactggaggcactttatggaagcattgaaaggtgatattgatatagttgagtatttgccaccccgttatgcaggcaagaagccccttgaaagggcacctgtttcgtggtcaaaggctaaatactacagagaggagatggctgcattgttgaagaagtacaaagttataaggtttacccacagtgattcacggctggctaataatggccttgcagctcacatccagaggctaagatgccgtgccaattatgaagcactccggtattcaaaggagattgtggatcttgggaagaaactggttgatagactaggaaataacagcgagccatatgttgctttgcatttaagatatgagaaagacatgcttgcattcaccggctgcagccacaaccttaccgcggaagaggctgatgagctaagggatatgaggcataaaactccgcattggaaggagaaggagattgatagtgaagcacgacggctccaaggtggatgcccgatgactcctagagaagcagctatctttctcaaggcaatgggctatccatcctcaacaactatctatatagttgcagggccgatatatggaagtgatagcatggcacccttccttgcagagttcccaaatgtgttctctcactctaatctagcaactgcagaagaattagaacctttcaagccgtatcaaaatcgtcttgctgccttggattacattgtggctcttgaaagtgatgtctttatatatacttatgatggaaacatggccaaagctgttcaggggcataggaggtttgaaggatttcgaaaaactataaatccagacaaacaaaattttgttgcgctgattgatcaattggacgagggtaccttatcctgggaagaattctcttcacaggttcaaagcttacattcagacaggattggagcaccgtaccggcggcaggctggctcatttcctaaggaggaagagaacttttatgcaaatcctcttcctggatgtgtatgcaacagttcccaggataaa

SEQ ID NO: 188 - protein, 420 aa, Populus trichocarpa
IWMKPNSDNFYKCIAPARSQTSMKTNGYLLVHANGGLNQMRTGICDMVAAAKLMNATLVLPSLDRESFWTDPSTFKDIFDWRHFMEALKGDIDIVEYLPPRYAGKKPLERAPVSWSKAKYYREEMAALLKKYKVIRFTHSDSRLANNGLAAHIQRLRCRANYEALRYSKEIVDLGKKLVDRLGNNSEPYVALHLRYEKDMLAFTGCSHNLTAEEADELRDMRHKTPHWKEKEIDSEARRLQGGCPMTPREAAIFLKAMGYPSSTTIYIVAGPIYGSDSMAPFLAEFPNVFSHSNLATAEELEPFKPYQNRLAALDYIVALESDVFIYTYDGNMAKAVQGHRRFEGFRKTINPDKQNFVALIDQLDEGTLSWEEFSSQVQSLHSDRIGAPYRRQAGSFPKEEENFYANPLPGCVCNSSQDK

SEQ ID NO: 189 - DNA, 1959 bp, Populus trichocarpa
atggcgttcaaatccaagataaaatggattgcactgtttgtcttgatactatcaatggtgtctctagtgattcacctctccatcacaaagctttcggggccttattcactgcaatctactttaatgcctgccattggatttaacctcactcctatctttggcggtgatagagctgttagaaataagaggtcgtgggggcatgtgaagtctttgaagtcactgcagccttatgccaacccgagaagcagttatcctgttccaaatgaaaagaacaacggttacatttatgcaaaaatttttggtggatttgagaagataagatcctcgatctgtgatcttgtcaccatatccaggcttctaaatgctactcttgtcattccagagattcaagaaagtcttcaatcaaaaggcattagttacaaattcaagagtttttcatatctctatgatgaagagcagttcatagcatcacttaaaaatgatgtaatcgttgtgaacagcctgcctgagaatttgaaggcgggcaggagaaggaatgagatccatacttataagcccaaaagttctgcttctccaagtttctatgttaaagaaattttgcctgagttaaagaaatccaaggttattggactagttcttcatgatggaggatgcctgcagtcaattcttcctccgagcatgtctgagtttcagaggcttagatgtcgagttgcatttcatgctctaaaatttcgcccaaaaattcaggtgcttggtcagttgatggttcagaggttacgggcatctggtcaacctttccttgcatttcatcctggcttagatgttcacactgagcttatacagtaccaaagggcacagatgattaagcaagggattcttaatgatgagctaagtgtagactcacacgtccgaagatccaatgggtcatgccccctcatgccagaagagattggtcttctccttaaagagatgggctattctactgaaacaatgatatacgtggctgggtctgaaactttcggtggtcaacgcattttgatccctctgcgagcaaacttctctaacactgtggatcgcactcaggtgtgcactaagcaagaattatctgatttggttggtcctgaaacacctcttccattgaatcctttccagcctccacctaccaaaagtgaggaacaattaaaagaagagtggaatagggcaggtccccggcctcgtccccttcctccacctccagacagacccatctatcaacatgaaaaagaaggttggtatggttggattactgagtctgacacagaaccagacccttcatctgtagatctgaggaatcaagcacacaggttaatctgggatgctcttgattatattgtctcagtggaagcagatgcattttttcctggtttccataatgatggtagtggatggccagacttctcaagcttggtcatgggacaccggctatacgagagtgcttcttctaaaacatatcggccagataggagggttcttgcagaacttttcaacattatccatgacaacttgtaccaccataacaatcgtacttggaaacatgtagtaagggaacatctcaacaaaagcttgagtgaagacggacttatcaggcaatcccttctgtcaaaaccaaccacattcctgtctcacccgcttcctgaatgctcttgtagaattccatctgctgaggttccaaaacaggtaaaaggtaatgatggccgattcctatatggaggagaggatgagtgcccaagatggatgcagcttagtcaggaagatactcgctcagagtcagcagtagtggaagagggtagtgatgataatagcgagtcagaatatgaaaatgatggtgttgaacagcaagaatctgatgacagtagaggtagaagtagtcttactcaaataccgatggatcaggatgatgaatgggatcctaatgactag

SEQ ID NO: 190 - protein, 652 aa, Populus trichocarpa
MAFKSKIKWIALFVLILSMVSLVIHLSITKLSGPYSLQSTLMPAIGFNLTPIFGGDRAVRNKRSWGHVKSLKSLQPYANPRSSYPVPNEKNNGYIYAKIFGGFEKIRSSICDLVTISRLLNATLVIPEIQESLQSKGISYKFKSFSYLYDEEQFIASLKNDVIVVNSLPENLKAGRRRNEIHTYKPKSSASPSFYVKEILPELKKSKVIGLVLHDGGCLQSILPPSMSEFQRLRCRVAFHALKFRPKIQVLGQLMVQRLRASGQPFLAFHPGLDVHTELIQYQRAQMIKQGILNDELSVDSHVRRSNGSCPLMPEEIGLLLKEMGYSTETMIYVAGSETFGGQRILIPLRANFSNTVDRTQVCTKQELSDLVGPETPLPLNPFQPPPTKSEEQLKEEWNRAGPRPRPLPPPPDRPIYQHEKEGWYGWITESDTEPDPSSVDLRNQAHRLIWDALDYIVSVEADAFFPGFHNDGSGWPDFSSLVMGHRLYESASSKTYRPDRRVLAELFNIIHDNLYHHNNRTWKHVVREHLNKSLSEDGLIRQSLLSKPTTFLSHPLPECSCRIPSAEVPKQVKGNDGRFLYGGEDECPRWMQLSQEDTRSESAVVEEGSDDNSESEYENDGVEQQESDDSRGRSSLTQIPMDQDDEWDPND

SEQ ID NO: 191 - DNA, 1728 bp, Populus trichocarpa
atgcacggctacagtcgcctcggaaacgccggggccaccggccgcgctgtcacagccacccccacgccgtctcctccttcctcacctcgcctccgtcacagccgcagcagcggaaagagcaattcgtctcctggcggtggtttttcggggggcggtggcggtcggggaggaggggggaagcagcatgtggtggagaggttgatgtttatggtggtaacggtggttttgaggcgaagaggattgttgctgtttgcgccattgctgtatgttgcagggatggttttgtatatgggttctttgaattttgatgttaatttgaaaaatggcggtgttgttgtacggaaacgtgcacctcctggtacggtgtaccggagtcctaaggtttttgacaagctttggccgtatatggaggctgagaacaatggcagtcacaatgcgttgatgacagcatgggatccaaaactgcgtcaagcttggaagcccagtggcatcagcaattactctgatgcagaattgccagagtctaatggtttccttataattgaagcgaatggtggtttgaatcaacaacgcttatcgatatgcgatgcagttgctgtggcaggattgctgaatgctactttggtcattccattttttcatctaaatagtgtttggagagattccagtaaatttggagaaatatttgatgaagatttcttcatacacgcacttaagaataatgtgaaagtagttcgagagctcccaagtgatgtacttgagcagtttgataataacataagcagcatagtaaacttaagggtaaaagcttggtccagcccgacctactatcttcagaaggttcttccaaagctgaggcagatgagggcagtacgcattgcacctttctccaacaggttggcacatgcagttcctccaaatatccagggtcttagatgcttagccaattttgaagccctgaggttttcagaatccataagaatgcttgcagagcagatggttgatcggatgatcaagaatagttctcaaagtggggggaaatatgtctcggtgcatctgcggtttgaaacggatatggttgcattttcatgctgtgagtatgatggcggggaagaagagaaacgagagatggatattgcacgagaaagtgcttggagaggaaaatttaggagaaggggtagagtaataaggccaggagcaaatcgtgtggatggaaagtgccctttaactccattggaggtagggatgatgcttaggggaatgggttttgataataccacctcagtatatgtcgcagcaggtaatatttataaagcagagaagtatatggctccacttaaacagatgtttccacgtttagaaacaaaggacacaatagctaccgctgaagaacttgtgccatttaagggccactcatctaggttggctgctcttgactacacggtttgcctgcatagtgaagtctttgtcacaacacaaggtgggaactttccacactttttaatgggtcacaggcgctatttgtatggagggcatgccaagacaatcaatcctgacaagagaaagttagctctcttatttgataaacccactatcagatgggaggtcttcaagcgacagatgcaaaatatgcttcgccacagtgatgtgaagggctctgaattaagaaagcccagtgcatcactttacacatttcccatgccagattgcatgtgtaaacaaactgaa

SEQ ID NO: 192 - protein, 576 aa, Populus trichocarpa
MHGYSRLGNAGATGRAVTATPTPSPPSSPRLRHSRSSGKSNSSPGGGFSGGGGGRGGGGKQHVVERLMFMVVTVVLRRRGLLLFAPLLYVAGMVLYMGSLNFDVNLKNGGVVVRKRAPPGTVYRSPKVFDKLWPYMEAENNGSHNALMTAWDPKLRQAWKPSGISNYSDAELPESNGFLIIEANGGLNQQRLSICDAVAVAGLLNATLVIPFFHLNSVWRDSSKFGEIFDEDFFIHALKNNVKVVRELPSDVLEQFDNNISSIVNLRVKAWSSPTYYLQKVLPKLRQMRAVRIAPFSNRLAHAVPPNIQGLRCLANFEALRFSESIRMLAEQMVDRMIKNSSQSGGKYVSVHLRFETDMVAFSCCEYDGGEEEKREMDIARESAWRGKFRRRGRVIRPGANRVDGKCPLTPLEVGMMLRGMGFDNTTSVYVAAGNIYKAEKYMAPLKQMFPRLETKDTIATAEELVPFKGHSSRLAALDYTVCLHSEVFVTTQGGNFPHFLMGHRRYLYGGHAKTINPDKRKLALLFDKPTIRWEVFKRQMQNMLRHSDVKGSELRKPSASLYTFPMPDCMCKQTE

SEQ ID NO: 193 - DNA, 1788 bp, Sorghum bicolor
atggacggtgcctcgtcctcagccggcggcggcagcggtgcttcttcttcttcgtcgccggcagcggtgcaggggagccggggcggccgggagctcgccgggagggtgggcgcgaccaacatcggcaggctgcggcacgggaagcagcagcatggcacgaggcccggcgtcggcgtgggcatcagcatcagcgtcacgtcctggcacctcagggtgttcgcggccgtcgtcggcctcatgggctgcctcctgctcgccgcctccctcgccatgtccgcgctgcaccaggtccagttcaggaacgccgccatctccaggaacttcaggggcctccagtctcccttctcggcagtgcagaacggctctgaacctgaaactttcgcgctatgggaagagccctacaggcaagcgcgcaagtggaagccctgtgctgctaagcacagtttggctgatgaagagcctgacaagatcaacagcggcttcatactggtcagcgcaaatggtggtctgaaccagcagcgtgtcgctgtatgtaatgctgttgtcgttgctgctctgctcaatgctacactagtcctcccacggttcctctacagcagcgtctggaaggacacaagtcagtttggtgacatctatcaggaagactacttcgtgaagtacatgaagaacgacgtgcgaatcgtgaaagaactaccagcacgccttcagtcactggacctcgaagcaattggcagccagatcactgacatggaaatctcgaaagaggctgaaccatccgagttcgtcaaatccatactcccaattcttcagcaaaatggcgtcgttcatttcctcgggtttggaaaccggctaggcttcgattcagtgcctgttcatctgcagaggctgagatgccgatgcaacttccatgctctcaagttcgtccctgagctccagcaagcaggctccctgctggtccagcggctgcgccaggtgagcgcgatgcagacggaaatggacaagcagctgttcggcagcaacatgctggacccggccttggcagagaaccaccacgccgccggcacgcccaacaggtacctcgccctgcatatgaggttcgaggaggacatggtggcctactcgctctgcgagttcggcggcggcgaggaggagaggagggagctgcaggcgtacagggagacccacttcccggcactcgcgctgcgcctacggaacaccacggtttcgccggaggagcagcgcagcctggggaggtgcccgctgacgccggaggaagcgggtctcgtcctctccgcgctgggatacgaccgccggacgttcatctacgtggccgggtcgcagatatacggcggcgcgccacggctgcggccgctgacgcggctgtacccgaatctggtcaccaaggaggatgtcctcaccgccgacgagctggccccgttcaagaacttctcttcacggcttgcggccttggacttcatcgcgtgcgcgtcggcggacgtgttcgcggtgacggactccggcagccagttgtcgtcgctggtgtccgggtaccgcatctaccacggcaggggccgcgcgccgacgctgcacccgaaccggaagcgctacgcgcaggtgctttccgaggaagagagcatcgcgtggggcggcttccagagaagggtgaggcagatggtggaggagtacaagcgggtgagcccgcggccgaggggccggagcgtctaccggcagccgaggacgcccgggtgcatgtgcagggccgccggcgacgggagcgtcgacttctga

SEQ ID NO: 194 - protein, 595 aa, Sorghum bicolor
MDGASSSAGGGSGASSSSSPAAVQGSRGGRELAGRVGATNIGRLRHGKQQHGTRPGVGVGISISVTSWHLRVFAAVVGLMGCLLLAASLAMSALHQVQFRNAAISRNFRGLQSPFSAVQNGSEPETFALWEEPYRQARKWKPCAAKHSLADEEPDKINSGFILVSANGGLNQQRVAVCNAVVVAALLNATLVLPRFLYSSVWKDTSQFGDIYQEDYFVKYMKNDVRIVKELPARLQSLDLEAIGSQITDMEISKEAEPSEFVKSILPILQQNGVVHFLGFGNRLGFDSVPVHLQRLRCRCNFHALKFVPELQQAGSLLVQRLRQVSAMQTEMDKQLFGSNMLDPALAENHHAAGTPNRYLALHMRFEEDMVAYSLCEFGGGEEERRELQAYRETHFPALALRLRNTTVSPEEQRSLGRCPLTPEEAGLVLSALGYDRRTFIYVAGSQIYGGAPRLRPLTRLYPNLVTKEDVLTADELAPFKNFSSRLAALDFIACASADVFAVTDSGSQLSSLVSGYRIYHGRGRAPTLHPNRKRYAQVLSEEESIAWGGFQRRVRQMVEEYKRVSPRPRGRSVYRQPRTPGCMCRAAGDGSVDF

SEQ ID NO: 195 - DNA, 1503 bp, Sorghum bicolor
atggccaagcacaaggcctcgcctccggccgcggtccgccgtcgcatcggcggcgccggggcgtccgccatccggtgggcgctgcgcgtcgcgaccagcatcgtggcctggacgctgctcctccacctcttcaccttcctcggcatcccccgcccgccgttgcccatcgcgcggccgtcctgcctgggcggcggccgcagcagcaactccaccgccgccgactccgtggttgaggccgggcacctggcgcccccggctctgcctctgcctcccagacggctttacaagagtaatggctaccttctagtttcatgcaatggtggtctgaaccaaatgcgagcagcgatatgcgacatggtgactgtagcacgctacttgaatctcaccatggtgatacctgaacttgataagcaatccttctgggctgatcctagtgattttggggatatttttgatgtaaatcatttcattgattcattgagaaatgaagtgaagattgtcaaagaactcccacagaagttcagtgaaaaagttcctctgtcaatgcaaccaatcagctggtctagtgagaaatactatttgaggcagatcttgcctctagtacgaaaacacaaggttgtacgttttagcaagacagattctcgtcttgcaaacaatggcctgcctctgaagctccaaaaacttcgctgccatgttaactacaacgcattgaggtttacaccatccattgaggctctaggaaacaagatgatctcaactctcaggagaactggatcttttattgtgcttcatctgagatatgagatggatatgcttgctttctctggctgtacacatggatgttctgatgaagaaacagaagagttgacaagaatgagatatgcatatccctggtggaaagaaaaggaaatagactctgagaagaaaagacttgagggattgtgcccccttactcctggagaaacaacttttgtactcaaagctcttggtttccccagagacactcgaatatatattgcatcaggtgaaatatatggtggtgaaaaaagattagctgtattgaagaaagaatttcctaacattgtgcggaaggagacacttttatctgatgatgagttgcgaccctttcagaagcactcaactcaaatggcagcactggactatcttgtttctgtcgcaagtgatgtttttatccccagtaatgatggaaacatggctaaagttgtagaaggacaccgcaggtttacaggcttccacagaaccatacagttggataggaagaagctagttgagcttatagatcttttcgaagatcaggagctgacctgggaagaattctctgttgctgtcaaggagctccacgggggccgaatgagccagcccaccagaaggagaattatccctggacaaccaaaggaagaggactacttttatgctaatcctcatgaatgccttggtcctgcaaaaaagcgaagggatagattaaaacatatggagatttga

SEQ ID NO: 196 - protein, 500 aa, Sorghum bicolor
MAKHKASPPAAVRRRIGGAGASAIRWALRVATSIVAWTLLLHLFTFLGIPRPPLPIARPSCLGGGRSSNSTAADSVVEAGHLAPPALPLPPRRLYKSNGYLLVSCNGGLNQMRAAICDMVTVARYLNLTMVIPELDKQSFWADPSDFGDIFDVNHFIDSLRNEVKIVKELPQKFSEKVPLSMQPISWSSEKYYLRQILPLVRKHKVVRFSKTDSRLANNGLPLKLQKLRCHVNYNALRFTPSIEALGNKMISTLRRTGSFIVLHLRYEMDMLAFSGCTHGCSDEETEELTRMRYAYPWWKEKEIDSEKKRLEGLCPLTPGETTFVLKALGFPRDTRIYIASGEIYGGEKRLAVLKKEFPNIVRKETLLSDDELRPFQKHSTQMAALDYLVSVASDVFIPSNDGNMAKVVEGHRRFTGFHRTIQLDRKKLVELIDLFEDQELTWEEFSVAVKELHGGRMSQPTRRRIIPGQPKEEDYFYANPHECLGPAKKRRDRLKHMEI

SEQ ID NO: 197 - DNA, 1377 bp, Sorghum bicolor
atggcgaggtcgaggcctagggtttggctcgtggcgggctgtgccgccgtcctgctgtgggcctccgtcgcgcagctcgtcgccgtcggccgccttctccagctttttggcctcgcgggcgacgccgttccctcgccgccaccttccgcgcttccgcccccgagaatatacaggagcaatggttatctgaagatatcttgtaatggtggtctgaatcagatgcgctcagagatatgtgacatggtggcagttgctcgtcttctaaatctcactatggttgtcccagaacttgacaagagatcattctgggctgatcaaagtaattttggagacatatttgatgtgaggcatttcatcgactcattgagagatgaggtgcacatcattaaacagcttccagagaagcttggtccaacagattcagacattattatacttgaaatgccacctgtgagctggtcagatgaaaaatattatttgcatcagatcttaccactgttcagcaaatacagtgtcatccattttaacaaaacagatgcccgcttagccaataatggtatcagtacagagcttcaactgcttagatgccgtgttaattttcatgcactgaaattcacacctcaaattgagggactagggaataaactggtacataaactgcgagctaagggatcatttgtagccttgcatttacgctatgagatggatatgctggcattttctggttgcaaccatggcctttcacctgaagaagctgaggagctcaaaaaaatgagatatgcttatccatggtggagagataaagaaattgattcccaagccaagaggtcgcaaggactatgcccacttactcctgaggaggcatcacttgttttgaaagctctagggtttcaaaagtatgctcttatatacatcgcagctggtgaaatttatgggggagataggagactagaaccactacgggctgcttttccaaaccttgtacgaaaggagatgctgctagactctgaagttctgcgtcaattccaaaatcactcttcccagatggctgcacttgatttcattgtatccacagctagtgatgttttcattcccactttcgatggtaacatggcaaagcttgttgaaggtcaccgaaggttcctgggtttccggagaagtgtggtgctagaccgacggaaattagttgaacttctagacctgtacaccaacaagacaatctcttgggacaattttgcatcttctgttcatgaagctcataaggaccgtgtagctcaaccatcctgcaggcgaaaacttgaaaacagaccaaaagaagaggattacttctatgctaacccccacgaatgcctagccaattcaaccttgtgcagctaa

SEQ ID NO: 198 - protein, 458 aa, Sorghum bicolor
MARSRPRVWLVAGCAAVLLWASVAQLVAVGRLLQLFGLAGDAVPSPPPSALPPPRIYRSNGYLKISCNGGLNQMRSEICDMVAVARLLNLTMVVPELDKRSFWADQSNFGDIFDVRHFIDSLRDEVHIIKQLPEKLGPTDSDIIILEMPPVSWSDEKYYLHQILPLFSKYSVIHFNKTDARLANNGISTELQLLRCRVNFHALKFTPQIEGLGNKLVHKLRAKGSFVALHLRYEMDMLAFSGCNHGLSPEEAEELKKMRYAYPWWRDKEIDSQAKRSQGLCPLTPEEASLVLKALGFQKYALIYIAAGEIYGGDRRLEPLRAAFPNLVRKEMLLDSEVLRQFQNHSSQMAALDFIVSTASDVFIPTFDGNMAKLVEGHRRFLGFRRSVVLDRRKLVELLDLYTNKTISWDNFASSVHEAHKDRVAQPSCRRKLENRPKEEDYFYANPHECLANSTLCS

SEQ ID NO: 199 - DNA, 1536 bp, Sorghum bicolor
atgcggagggcgtcgccttcgccgtctccggcgaggggcccggcggtcttcgccgccgcggtcgtggtgtttctgccgaccttattccccgggatgttctctccgcttggccacgccttcccttctctcttctcggagtggaatgcccctaagccaatgcatccttctcttttaaatgaggctttgcgatgggcagttacagacaaacaaaagacagggctatggtcacccttgccataccaggggtggaaaccatgcttaaagccatcagtttctcacacattacctctggaaccaagtggattcatccaagtatttcttgatggtggattgaaccagcaaagaatggggatatgtgatgccgttgcagttgcaaagattcttaatgctactcttgtgatcccacatcttgaagtaaaccctgtttggaaggattcaagctcatttgaagagatatttgatgtggatcactttatcaactccctaaaagatgaagtttccattatcaaagcgcttccaaaagaattttcttggagcacaagagagtactatggcacaggcatccgtgctacaagaataaaaactgcacctattcacgcctcagcaaattggtatttggagaatgtcagtcctatcctgcaaagctatgggattgctgcagttgctcccttttctcaccgccttgcatttgatgatttgcctgcggatcttcaacgcttgcgttgtaaagttaacttccaagctctggtctttcggtctcacattatctcactcggagagacacttgtgaagcgcttgaggtcttcagtcgggggtcgttccagtaaatctatccatcaagttgtaggagacacaaatcaagctcaaaaatatgcagttttgcatctccgttttgataaggatatggctgcacattctgcctgtgactttggaggtggcagagctgaacagctagctcttgctaagtacaggcaagttatatggcaagggagggtattaaattcacagctaactgatagggagcttcggaacacaggacgctgcccattgaccccagaagagattgggctgttactggtagcccttggctttgacagcaaaactcgactctatcttgcttctcacaaggtatatggtggagaagccaggatctctagcctgcgcaagctatttccattgatggaggacaagaggagccttgcatctgaagatgaacttgctaatgttgaagggaaggcttctgttctagcagctcttgactattatatcagcatgcatagcgatattttcatctccgcatctcctggaaatatgcacaatgctttgatggctcaccgaacctatgagaacttgaagaccataaggccaaacatggcattgcttggccgcatctttgtgaacaagagcatggagtggcaagagtttcagcaggttgtacaggcaggacacaaaggaagatacgggcaaatccggctgaggaaggcaacgcaatccatctatacgtatcctgcacctgattgtatgtgccaaggatag

SEQ ID NO: 200 - protein, 511 aa, Sorghum bicolor
MRRASPSPSPARGPAVFAAAVVVFLPTLFPGMFSPLGHAFPSLFSEWNAPKPMHPSLLNEALRWAVTDKQKTGLWSPLPYQGWKPCLKPSVSHTLPLEPSGFIQVFLDGGLNQQRMGICDAVAVAKILNATLVIPHLEVNPVWKDSSSFEEIFDVDHFINSLKDEVSIIKALPKEFSWSTREYYGTGIRATRIKTAPIHASANWYLENVSPILQSYGIAAVAPFSHRLAFDDLPADLQRLRCKVNFQALVFRSHIISLGETLVKRLRSSVGGRSSKSIHQVVGDTNQAQKYAVLHLRFDKDMAAHSACDFGGGRAEQLALAKYRQVIWQGRVLNSQLTDRELRNTGRCPLTPEEIGLLLVALGFDSKTRLYLASHKVYGGEARISSLRKLFPLMEDKRSLASEDELANVEGKASVLAALDYYISMHSDIFISASPGNMHNALMAHRTYENLKTIRPNMALLGRIFVNKSMEWQEFQQVVQAGHKGRYGQIRLRKATQSIYTYPAPDCMCQG

SEQ ID NO: 201 - DNA, 1947 bp, Sorghum bicolor
atggggtaccagcccatgcacggcaacggcgggacagccggtgccgggacatccggctccggaggcggcggcggcggaggaggaggagaccacttgcaccaccaccaccagcgcctgcacagcccccgcatggccgccggcgggggctccatgacgcgccgggccagctcgttcaagcgcggcgcgagcggcgagatcgagctccagatcggctccccgcgctcgccgaggtgcgacgggctggggagcccgccctcggactccgtggagccgtccggtggcggcctcctccaccaccaccaccaccagggccagcagaaccagcacctccggttccggctcttcaagccgccggtcggctccggcggcagcgcggtcgaggtcgggctcggcctggggatccgggagaggaggaagctcgggaacatgctgttcctcgccttctgctgcgtgtgcttgctcctcggcgtcgccaagatcttggcgggcggctggttcgccctccctggcaatgacaaagacgccgatttgaaggatctctctgtctccttctctggtgagaaagtgcatcaagttgatcatcacttcgtatacatgggaggaaaagaaagtgacaggactttgatgactctggaatctaacatcgatggaagagaagacactgtggctgaggcctctgatgtctggtctcagccaaacagtacaaatttcagacaatgcattgtttcaaactctcataaaaagcaagattctcatacgaatggttacattatcataaacgcaaatggaggtttgaatcaaatgagatttgggatatgtgatatggttgctgttgctaagatcctgaaggcaactctggttcttccttcactcgatcatacatcctactggggagatgacagtgaatttaaggaccttttcaactggaggcacttcattgagtcactgaaagaagacattgatattgttgaaacacttccccctgaatacagcgacattgaacctttggctaaagctccgatatcttggtccaaggtgcattattacagagatgaaatcctcccccttctgaagaaacacaaagtcatttactttacacatacagattctcgccttgctaacaatggccttcctagttatattcagaaattaagatgccgagttaactacagatctttgaaatattctcatacaattgaagatcttggtaataccctagtttcaaggatgcgtcaggatggaagcccatatcttgctctccatctaaggtacgagaaggatatgttagcttttactggttgcagccataacttgacatcagaagaagaggaggaactgcgtaaaatgcgttatgaagtcagtcactggaaagagaaagaaatcaatgctactgagagaagaagccttggtggctgtcctttgacaccaagggaaacttcatttttactcaaaggattgggtttcactcgtaacaccagaatttacttggttgctggtgaaacttttggcaatggaagtatgaatgctctgaaggacgattttcccaacatttattctcattctacactggcaacagaagaggaacttgcacccttcaaaaaccatcagaatatgcttgctggtcttgattacatcgtggctcttcagagtgatgtctttatgtacacttatgatggaaatatggcaaaagctgtacaaggccatcgtcgttttgagaacttcagaaagactattaacccagacaggatgagttttgtgaacctgatagatgaatttgatgaaggaagagtgccctgggatacattcagctcagaagtgaaaagattacacaaagatagaataggtgctccatattttagggagcctggagaattcccaaagctagaagagtctttctttgcgaatcccttgcctgactgtatatgtgagaaacatagtgaagaatga

SEQ ID NO: 202 - protein, 648 aa, Sorghum bicolor
MGYQPMHGNGGTAGAGTSGSGGGGGGGGGDHLHHHHQRLHSPRMAAGGGSMTRRASSFKRGASGEIELQIGSPRSPRCDGLGSPPSDSVEPSGGGLLHHHHHQGQQNQHLRFRLFKPPVGSGGSAVEVGLGLGIRERRKLGNMLFLAFCCVCLLLGVAKILAGGWFALPGNDKDADLKDLSVSFSGEKVHQVDHHFVYMGGKESDRTLMTLESNIDGREDTVAEASDVWSQPNSTNFRQCIVSNSHKKQDSHTNGYIIINANGGLNQMRFGICDMVAVAKILKATLVLPSLDHTSYWGDDSEFKDLFNWRHFIESLKEDIDIVETLPPEYSDIEPLAKAPISWSKVHYYRDEILPLLKKHKVIYFTHTDSRLANNGLPSYIQKLRCRVNYRSLKYSHTIEDLGNTLVSRMRQDGSPYLALHLRYEKDMLAFTGCSHNLTSEEEEELRKMRYEVSHWKEKEINATERRSLGGCPLTPRETSFLLKGLGFTRNTRIYLVAGETFGNGSMNALKDDFPNIYSHSTLATEEELAPFKNHQNMLAGLDYIVALQSDVFMYTYDGNMAKAVQGHRRFENFRKTINPDRMSFVNLIDEFDEGRVPWDTFSSEVKRLHKDRIGAPYFREPGEFPKLEESFFANPLPDCICEKHSEE

SEQ ID NO: 203 - DNA, 1497 bp, Sorghum bicolor
atgggcggcggcggaggaggcggcgggaagtccgagaaggcgcggcgttcgtcgtcggcgcgggtgaagctgtgggtagcgcgcgccagcaccgtgctgctctggacgtgcgtcgtccacctcgcggcctaccgggagctctgggcgcccagcgtgctcaccaggtggcctggctgcctcaaccacccgcacgtcgtgcagaatccatcggaggaggtggcggtggctgtggcggacgccggccagaggcaggcagcgcgcgccgtggtgcttccacccaaaagaatctacaagaacaatggctatctgatggtctcctgcaatggtgggcttaaccagatgcgagcagcaatttgtgatatggtaacgattgcacggtatctgaacgttactctaatcgtaccagagttggataaagcttcattttgggctgatcccagtgattttcaagatatatttgatgtggactacttcatagcatcactaagagacgaggtccgaattctgagacaactgcctccaaggcttaaaagaagagtggaaatgggatttcttcggtccctgccaccagtcagctggtctgatatcacctattaccgtcgtcagattctacctctgataaagaagtacaaggtcattcacctaaacaggacagatgctcgccttgcaaataatggcttacccatggaaattcagaaactaaggtgtcgtgtcaattacaatgctttgagatttacccctgaaatagaaaatctgggcagacgtttggttcaagttcttcgccggaatggaccctttgtagttcttcacttacggtatgagatggacatgcttgccttctctggatgcacacatggttgcagcaatatggaggctgaagagctcacgaaaatgagatatgcctacccatggtggaaggagaaagtgattgactctgatgccaagaggaaagacgggctctgtcctttaacaccggaggagactgcactggtgttgcaggcactcggcattgatcgcagttatcaaatttacattgccgcaggtgaaatatatggtggacaaagaagaatggctgctcttacctcggcttatcccagtgtggttagaaaagagacattattgccttcagaactcagtcttttccagaaccattcttcccagatggcagcactggattatatggtatccttggagagtgatattttcatacccacttatgatggtaacatggcaaaagtcgtagaaggtcatcgcagatacttgggattcaagaagacggtactgctagatcggaggcatattgtcgagcttgttgatgagtacagaaatggcacattgagctggactgatttctcctctgctgtcatggcgtcgcatatcagccgcatgggtgaaccgtctaggaggcagatgattccggacaaacccaaggaagaggattacttctatgcgaaccctcacgagtgtttgcctgtagaagatttctcagccttgtga

SEQ ID NO: 204 - protein, 498 aa, Sorghum bicolor
MGGGGGGGGKSEKARRSSSARVKLWVARASTVLLWTCVVHLAAYRELWAPSVLTRWPGCLNHPHVVQNPSEEVAVAVADAGQRQAARAVVLPPKRIYKNNGYLMVSCNGGLNQMRAAICDMVTIARYLNVTLIVPELDKASFWADPSDFQDIFDVDYFIASLRDEVRILRQLPPRLKRRVEMGFLRSLPPVSWSDITYYRRQILPLIKKYKVIHLNRTDARLANNGLPMEIQKLRCRVNYNALRFTPEIENLGRRLVQVLRRNGPFVVLHLRYEMDMLAFSGCTHGCSNMEAEELTKMRYAYPWWKEKVIDSDAKRKDGLCPLTPEETALVLQALGIDRSYQIYIAAGEIYGGQRRMAALTSAYPSVVRKETLLPSELSLFQNHSSQMAALDYMVSLESDIFIPTYDGNMAKVVEGHRRYLGFKKTVLLDRRHIVELVDEYRNGTLSWTDFSSAVMASHISRMGEPSRRQMIPDKPKEEDYFYANPHECLPVEDFSAL

SEQ ID NO: 205 - DNA, 1788 bp, Sorghum bicolor
atgggccagccgcggcggcgcggctacccgcacgggcacggccgccaccaccggtgcccgcgccgcattgcgctgccggcggccgggctgggcctgctctttctcgccgtctcgctcctctccgtctcactcctctccgcgccgccgctcgccgacccgcgcacgggcctcggcacttcctcttcctcccgacggttcctccgccgctatccgacaaacggctccggcggcgaactagagggctccgagagcggggatgcgttcagtgttacgacacatggatggactgggcaggatgatctttggcgatcgaagcttgctagcaatttccacagatgcagcaactctagcaataaatttcttgattctggtgttaccactcaaccagatcgatacttgattgttgttacaagtggaggtcttaatcagcagagaacggggatagtcgatgctgtagttgctgcacgtattttgaacgctacacttgttgttcccagactggatcaaacatctttctggaaagattcaagtaatttttcagaaatctttgatatggactggttcatctcatatcttgaaaaggatgtcagaattatcaaagagcctccagaaaaaggaggtaaagcaatgaaaccttataaaatgcgtgtcccccgaaaatgtactccacggtgttacttgaaccgcgtcttaccagcacttttgaaaaaacatgttattcgaatgactaaatatgattataggctctcaaataagttggacactgacctgcaaaaactacgttgcagagtcaactatcatgctttgagatttactgacccgatacaagaattggctgaaaagctaatacagcgaatgcgagaaaagagcagatattttattgctcttcacctgagatttgaacctgatatgctcgccttttctgggtgctattatggtggtggagaaaaggagaggagagaattagcttcaattcgcaaacgatggagaaccttgcatatacgtgacccggagaaaggaagaaggcaaggtaggtgtccactaactcctgaggaggtagggttgatgttgagggcattaggctacagaagtgatgtgtacatttatgttgcttctggtgagatatacggaggggaagatactttagcacccctcaaagcgctctttcctaatttccatacaaaagaaacactgtcaagccaagaggagcttgctccattcctaaagttctcatctcgcatggctgcaatcgatttcattgtctgtgatgaaagtgatgcttttgtggctaacaacattggtaacatggccaaaattctggctgggcaaaggaggtattttggccacaagagaacaatccggccaaatgctaaacagctctatcccttattcatgaagaggggaaatatgtcatgggatgcatttgcctcacaggtgcgaactatccagaaaggatatatgggagagcctatggaaatcacaccaggaagaggcgaatttcatgccaaccctgccgcctgtatatgtgaaaagagcggccgaaactcagtaatagtcaagtccatttctggaagtacccaggaacctgtaactgacaccagaataaggaaagccattgacattggtagaccaccataccctgtttatactgacgaagaggcagatggatctgatacagaagaagatccagatagcagcgggagaggagaggtgattgacactgaacctgacgatgattctgtggtcagacaggaggatcctgagctagaggagatcctgtcagattag

SEQ ID NO: 206 - protein, 595 aa, Sorghum bicolor
MGQPRRRGYPHGHGRHHRCPRRIALPAAGLGLLFLAVSLLSVSLLSAPPLADPRTGLGTSSSSRRFLRRYPTNGSGGELEGSESGDAFSVTTHGWTGQDDLWRSKLASNFHRCSNSSNKFLDSGVTTQPDRYLIVVTSGGLNQQRTGIVDAVVAARILNATLVVPRLDQTSFWKDSSNFSEIFDMDWFISYLEKDVRIIKEPPEKGGKAMKPYKMRVPRKCTPRCYLNRVLPALLKKHVIRMTKYDYRLSNKLDTDLQKLRCRVNYHALRFTDPIQELAEKLIQRMREKSRYFIALHLRFEPDMLAFSGCYYGGGEKERRELASIRKRWRTLHIRDPEKGRRQGRCPLTPEEVGLMLRALGYRSDVYIYVASGEIYGGEDTLAPLKALFPNFHTKETLSSQEELAPFLKFSSRMAAIDFIVCDESDAFVANNIGNMAKILAGQRRYFGHKRTIRPNAKQLYPLFMKRGNMSWDAFASQVRTIQKGYMGEPMEITPGRGEFHANPAACICEKSGRNSVIVKSISGSTQEPVTDTRIRKAIDIGRPPYPVYTDEEADGSDTEEDPDSSGRGEVIDTEPDDDSVVRQEDPELEEILSD

SEQ ID NO: 207 - DNA, 1482 bp, Sorghum bicolor
atggtggccgtcggcggcggcggggcccggcggaggcgggcgtggcggtgggccatgcgggcggaggctagcgccgtcgtgtggacggcggtcgtgcaggtcgcctccatcgccgggctcttccgcccgcgggtagtcgccgactgcggcggcggtgggggcgggaaaggcggcggcggcgccgccgcggccgggctcgccgcgctcgccggcgaggacggcgccgcgacgaggctatcgccgccggcgctcgtgcccaagagaatttacaaaagcaatggctacctactggtgacatgcaatgggggcctcaatcaaatgcgagccgggatatgtgatatggtgactatagctcgccatctaaatctaacacttgtggtccctgaactggataaaaggtcgttttgggctgacccaagtgattttggagatatttttgacgtggaccactttattaattccttgagagatgagctgatgatagttaaagagctgcctttgaaactccagttaagaactaagaagaaactatactcaatgcctcctgtcagctggtcaaatgaaacatactatctaaagcggatattacctcttgcaaggaagcacaaagtaatccattttgataaatcagacgctcgccttgcaaacaatggccttcctattcagctccagatgctgcgttgccgtgtaaactttgaggctttgaaattcaccccacagattgaggcccttggcagaaagcttatctccactctccagaggagtgggcaatttgttgtgcttcacttgcgctatgaaatggacatgctctccttttcaggctgcacacatggctgctcaactaaagaaactgaggagctcactaaaatgagatatgcttatccatggtggaaagaaaaagagatcgattctgaagtgaagaggcttcagggactttgccccctcacaccagaggaaattactctagtgcttaaagccctagggttcacaaaggatacgctgatatacattgcttctggtgaaatctatggtggtgaaaggcgtttggcggtgctcaaggatgcttaccctaaactagtaaggaaggagaaaattttatctcctgatgaattgcgaccattccagaaccattcaacccagatggcagcactggattacatggtttctctagcaagtgatattttcattcccagctatgatggaaatatggcaagggttgttgaaggtcaccgcaggtatatgggtttccataagaccattggtttggacagaaagaagcttgttgagctcttggaccttttccaaggaggtgctctatcttgggacgaattctcagacgcagtgaaggaggcacacaagagccgcatgggccaacctacagaaagaaaggtcatccctggccagcccaaggaagaggactatttctatgctaatcctcaagaatgccttggctccaacgggggactaagagacatttcctga

SEQ ID NO: 208 - protein, 493 aa, Sorghum bicolor
MVAVGGGGARRRRAWRWAMRAEASAVVWTAVVQVASIAGLFRPRVVADCGGGGGGKGGGGAAAAGLAALAGEDGAATRLSPPALVPKRIYKSNGYLLVTCNGGLNQMRAGICDMVTIARHLNLTLVVPELDKRSFWADPSDFGDIFDVDHFINSLRDELMIVKELPLKLQLRTKKKLYSMPPVSWSNETYYLKRILPLARKHKVIHFDKSDARLANNGLPIQLQMLRCRVNFEALKFTPQIEALGRKLISTLQRSGQFVVLHLRYEMDMLSFSGCTHGCSTKETEELTKMRYAYPWWKEKEIDSEVKRLQGLCPLTPEEITLVLKALGFTKDTLIYIASGEIYGGERRLAVLKDAYPKLVRKEKILSPDELRPFQNHSTQMAALDYMVSLASDIFIPSYDGNMARVVEGHRRYMGFHKTIGLDRKKLVELLDLFQGGALSWDEFSDAVKEAHKSRMGQPTERKVIPGQPKEEDYFYANPQECLGSNGGLRDIS

SEQ ID NO: 209 - DNA, 1707 bp, Sorghum bicolor
atgcagaaccacgcgtacagccggctgggcatctcgggggccggggcggccgtgccgtcgcctccgtcgtcgccgcggcgcgcgtgggggaggagggcctcggcgaagggcgggtggtcggcgagggccagcgcgggcgcgggctggggctggggcgcggcgcggagggttgcgcgggcggtgcttgcggcgctgctgcggaggcaggcggtgttcctcttcgcgccactgctgtacgtggcggcgatgctgctctacatgggctccatctcgctcgacagtgtgccccgcatcatctcgcgcccggcgcctgggtcagtgtaccgcagcccgcagctctacgcccgcctccgcgccgatatggacgccgataatgccaccgacgcgctagcaactgtatggcggcatgcttacagaggtggtgtttggagaccttgcataagcaataataccaacggtttgcctgaatcaaatggctacatatacattgaggctaatggtggtttgaatcaacaacgaacatcgatttgcaatgcagttgctgttgccggttttctgaatgcaactcttgtaatcccaaactttcactatcacagtatttggagggatcccagcaaatttagtgatatttatgatgaggattactttatccaacgcttaaagaatgatgtccgggtggttgacaaggtgcctgagttcatcatggagcggtttggtcacaatctgagtaatgcatttaatttcaagataaaggcttggtctcctattcagttctatgaagatattgttctccctaagttgatcgaagaaaggctcataaggatatcaccttttgcgaatcggctgtcattcgatgcgcctcctgctgttcaacgtctacgatgtctagcaaattttgaagccttaaaattttctaaaccaatcactaatatatctaatattttagtttctcggatgagagaaaaaagtgttgaaaacaatgggaaatatgtagcagtgcatctccgctttgaagaggacatggttgccttctcttgttgtgtctttgatggcggtgacaatgagaagaaggaactggatgcagccagggaaaaaggttggaaagggaaatttactaggccaggacgtgtaataaggcctggagcaataaggatgaatgggaaatgtccactgacccctttggaggttggattaatgctgcgcggaatgggtttcagcaataatactgcaatatatctggcttctggaaggatatataaagcagaaaagaacatgtctcctctccttgaaatgttccctctcttgcagataaaagaaacattggcactggatgaagaacttgctccattcaagaatttctcctcaaggatggcagctatagactacagtgtctgtgttcatagtgaggtttttgtgactacgcaaggtggaaatttccctcatttccttattgggcatagaagatacttgtatggtggccatgcgaagacaattaagcctgataaaagaagattggccatactctttgatagtccacgtattggatggaagtcactgaaacggcaattgttcaatatgagagcacatagtgacgtgaagggtattgaaataaaaagagcaaatgaatctgtatacacctttccatgccctgattgcatgtgccgttcaaacaaacaagaacactccaaatccatcgtggccagatag

SEQ ID NO: 210 - protein, 568 aa, Sorghum bicolor
MQNHAYSRLGISGAGAAVPSPPSSPRRAWGRRASAKGGWSARASAGAGWGWGAARRVARAVLAALLRRQAVFLFAPLLYVAAMLLYMGSISLDSVPRIISRPAPGSVYRSPQLYARLRADMDADNATDALATVWRHAYRGGVWRPCISNNTNGLPESNGYIYIEANGGLNQQRTSICNAVAVAGFLNATLVIPNFHYHSIWRDPSKFSDIYDEDYFIQRLKNDVRVVDKVPEFIMERFGHNLSNAFNFKIKAWSPIQFYEDIVLPKLIEERLIRISPFANRLSFDAPPAVQRLRCLANFEALKFSKPITNISNILVSRMREKSVENNGKYVAVHLRFEEDMVAFSCCVFDGGDNEKKELDAAREKGWKGKFTRPGRVIRPGAIRMNGKCPLTPLEVGLMLRGMGFSNNTAIYLASGRIYKAEKNMSPLLEMFPLLQIKETLALDEELAPFKNFSSRMAAIDYSVCVHSEVFVTTQGGNFPHFLIGHRRYLYGGHAKTIKPDKRRLAILFDSPRIGWKSLKRQLFNMRAHSDVKGIEIKRANESVYTFPCPDCMCRSNKQEHSKSIVAR

SEQ ID NO: 211 - DNA, 1890 bp, Sorghum bicolor
atggtcgcgtcgtcgtcgtccacagcatcagcaccctcgccctgcagctgcagcccggtgacgtccggcgcgcaccgccgccgcctcacggacgccgccgcggccgttgactacttcgtcgtcccgtgcgacgacgacagcgacgacggccgcggtggccacggcgccggcgccggcgcggcgcgggtgaaggctctgttcttcgcgcggagggccagcggcggcaagcgggtgcccgtggtcgaccaggcctgggtgcggaacgcggtggcgtgcctgctcggcgtcgccgtcgtcgtcggcctcgtcatgagctcgcgccgcggcgccactaccggcgcggaggggaggctcgttcgcagggtggacgccgaggtgctgcggtggagggaggagaacctcaccgccgtcgctcgccgcccgcccgacccgccgctctgcatggacctagaaaccattcgaacgtgccgagttaaaaggatccaagccaagtcggcgactggaggcaatcttcgtggactgggtctgggtggggacattcagactggatgccgaagacatttcagaggctgcccgattcaggaaggagtccaaggtcgccgtcccatgacccagatatggataaaaccagatagtgagggttacacaaaatgcattgaacgcccaaaaaatcgttacagaaccaacagtacaaccactggctatataattgctgaagccaatggtggacttaaccaaatgagactgggaataagtgatatggttgcagttgctaagctcatgaatgccaccctagtaatccctaccctggaccataaatcattctggactgatccaagtgatttcaaagatatatttgatgtgcaacacttcaaggaaactttagaagatgacatcatgattgtggattccttgccgccagatttcaaaagattgaaaccctatattagagcacccaaatcctgggccagggcttcttattacagagctttcacaaggacactgaagaaggccaaagttgtgaaattcacacatacagattcgcgtattgtcaacaatggtctccctccttctatccaaagactccgatgccgtgcaaattacgaggcactaagatacaatcaagaaattgaagagctaggtaatactctagttgatagactgaggaatggatccaaccattatatcgcacttcacttaaggtatgagaaggacatgctctcattcactggctgcagccacaacctaacatatcaagaggcagaggaactgagggaaatgcgactcaaggtgcagcattggaaagagaaggaaatcaacagtaaggagaggcgactccaaggaggctgccctatgactcctcgtgaagcagctcttttcctgaaagctatgggttatccttccaccacaaagatctacattgtatcaggtgaaatatatggtgtacatagcatggatgcattaaaggacgaatatccaaatgtctatacacattatagtctggcaacagcaaatgaattagagtctctcaagctgtaccaaaatagattagctgctatagactacaatgtagccctccagagtgatgtttttgtgcatacatatgatggaaatatggctaaagcagttcagggacacagaagatatgaaggattccgaaagaccattaaccctgacaggcacaagcttgttgagctcattgacaagcttgatgaagggacaatagattggacagagtttgcaagtgaagtgaagatgcatcatgaaaacaggattggaggtccacgtcagaggttgtctggtcgaagtccaaggcatgaggagtatttttatgcaaatcctcttccagggtgcttgtgcaaaagaaacacacaggatcaagtggcatga

SEQ ID NO: 212 - protein, 629 aa, Sorghum bicolor
MVASSSSTASAPSPCSCSPVTSGAHRRRLTDAAAAVDYFVVPCDDDSDDGRGGHGAGAGAARVKALFFARRASGGKRVPVVDQAWVRNAVACLLGVAVVVGLVMSSRRGATTGAEGRLVRRVDAEVLRWREENLTAVARRPPDPPLCMDLETIRTCRVKRIQAKSATGGNLRGLGLGGDIQTGCRRHFRGCPIQEGVQGRRPMTQIWIKPDSEGYTKCIERPKNRYRTNSTTTGYIIAEANGGLNQMRLGISDMVAVAKLMNATLVIPTLDHKSFWTDPSDFKDIFDVQHFKETLEDDIMIVDSLPPDFKRLKPYIRAPKSWARASYYRAFTRTLKKAKVVKFTHTDSRIVNNGLPPSIQRLRCRANYEALRYNQEIEELGNTLVDRLRNGSNHYIALHLRYEKDMLSFTGCSHNLTYQEAEELREMRLKVQHWKEKEINSKERRLQGGCPMTPREAALFLKAMGYPSTTKIYIVSGEIYGVHSMDALKDEYPNVYTHYSLATANELESLKLYQNRLAAIDYNVALQSDVFVHTYDGNMAKAVQGHRRYEGFRKTINPDRHKLVELIDKLDEGTIDWTEFASEVKMHHENRIGGPRQRLSGRSPRHEEYFYANPLPGCLCKRNTQDQVA

SEQ ID NO: 213 - DNA, 1713 bp, Sorghum bicolor
atggctgagctgcggcactcggcggcggcgcgtgcgtccaactcccccgccaagcgcgactccgacgcctccgccgcgtcgtcccccttcctcccctccccctccacccgcggcagccgcggcggcgacgacgacgacgacggcaaggacgtccaccgctcgtcccctctcctgtcgcaccaccaccacaagcgcgcccacctgctgacgtccccgttccgctccctcctcgcactggaggaccccaggtcccccgccgcctcgtcctcctaccggatcctgcttgccctcctcgcgctcctcctcgccgctgggatcttctgcgcgcccttgctctggtcccgccttaacacgccgtacttgtgccacaaggaggggatcacgctccactgccctgagacgaaggaacccccatctctatgggagaatccacgtgctgccactacatcttggaagccctgtgcagagcgacgcagcaatgagccctcagatgtcccatcagtaaatgaaacctctgggtatatttttatccatgctgagggaggactaaaccagcaacgcatagctatatgtaatgctgttgcaattgccaaaataatgagagcaacgcttattttgcctgttctgaagcaggaccaaatttggaaagaccagacgaaatttgaagatatctttgatgttgatcattttataaattatttgaaggatgatgtacggattgtccgagatatccctgactggttcacagagaaggatgagctgtttaccagtataaagcgtactgtgaagaacatcccaaagtatgcttcagcacagttttatattgacaatgtacttccaaggatcaaagagaaaaagataatgtctatcaagccatttgtcgacaggttgggatatgataatgtaccaatggagattaaccggctaagatgcagagtaaactatcacgcattaaagttcctacctgatattgaggaaatggccgataagcttgcagcaagaatgaggaacagaactggcaacataaatccatacatggctcttcacctgagatttgaaaaaggaatggtggggctttctttctgtgattttgctggcacacgggaggagaaggcgatgatggccgcttacaggcagaaagaatggccaaggcgctacaagaatggatcccatctgtggccactggcactgcagaagagaaaagaaggccgttgccctcttgagcccggtgagattgctgtgatcctgcgcgcactggggtacacgagcggaacacaaatatacgtcgcctcagggcaagtgtacggcggcaagaaccggatggctcccctcaggaacatgttccccaacttggtgacgaaggaggagctggcgagcgcggaggagctggcgccattccggcggcacgtgacgagcctggcggcgctggacttcctggtgtgcctgcggtcggacgtgttcgtgatgacgcacggcggcaacttcgccaagctcatcatcggggcgcgacgctacgcggggcaccgcctcaagtcggtgaagcccgacaagggcctcatgtccaagtccctgggcgaccccgacatgggctgggcctccttcgcggaggacgtcgtcgtcacgcaccgcacgcggacgggcctccccgagcccaccttccccagctacgatctctgggagaacccgctcacgccctgcatgtgcagggcctga

SEQ ID NO: 214 - protein, 570 aa, Sorghum bicolor
MAELRHSAAARASNSPAKRDSDASAASSPFLPSPSTRGSRGGDDDDDGKDVHRSSPLLSHHHHKRAHLLTSPFRSLLALEDPRSPAASSSYRILLALLALLLAAGIFCAPLLWSRLNTPYLCHKEGITLHCPETKEPPSLWENPRAATTSWKPCAERRSNEPSDVPSVNETSGYIFIHAEGGLNQQRIAICNAVAIAKIMRATLILPVLKQDQIWKDQTKFEDIFDVDHFINYLKDDVRIVRDIPDWFTEKDELFTSIKRTVKNIPKYASAQFYIDNVLPRIKEKKIMSIKPFVDRLGYDNVPMEINRLRCRVNYHALKFLPDIEEMADKLAARMRNRTGNINPYMALHLRFEKGMVGLSFCDFAGTREEKAMMAAYRQKEWPRRYKNGSHLWPLALQKRKEGRCPLEPGEIAVILRALGYTSGTQIYVASGQVYGGKNRMAPLRNMFPNLVTKEELASAEELAPFRRHVTSLAALDFLVCLRSDVFVMTHGGNFAKLIIGARRYAGHRLKSVKPDKGLMSKSLGDPDMGWASFAEDVVVTHRTRTGLPEPTFPSYDLWENPLTPCMCRA

SEQ ID NO: 215 - DNA, 1500 bp, Sorghum bicolor
atggggatcaaggcggtgggaaagctcaggtgcccgtcgtcggtggccgccgcggcgcggtcaagcttgaagctgtggatgctgcgggccaccacgacggtcctgctctggacctgcgtcgtgcagttcacggcggtagggaacacctggacctgggggcctcgcgtgctcaagggatggccgtcgtgccggacggcgcgggaggcggccgccgtcaccaccaccacgcggcttgcgatgccggagcccgtcgtggagaaggctccgctgccaccgaagagaatttatcgaaacaatggttatttgatggtttcatgcaatggtgggcttaaccaaatgcgagctgctatatgtgatatggttgtcattgcaagatctttgaatgtgactttaatagttcctgagttggataaaacatcgttttggaatgatccaagtgaatttcaggatatatttgatgttgaacattttgtaatctctcttagagatgaggttcgcatacttagagaattgccaccaaggatacagcgaagagtggggctaggaaagtttcactcaatgcctcctattagttggtcagatatctcttattaccataagcagattctacctctgattcggaaatacaaggtactccatcttaatagaactgatgctaggcttgctaataatggtctgcctctggacgtccagagactgcgttgccgggtgaattattctgcactgaaatttacatcccaaattgaagagttaggaaggagagtaattagaatgcttcgccaaaatggccccttcttagttcttcatttacggtatgagatggatatgcttgccttctctggctgtactcaaggttgtactcctaaagaaaccgaggaacttacaaggatgaggtacgcttacccatggtggaaagagaaagtaataaactcttttgtgaaaagaaaagatggcctttgccctttgacgccagaggaggttgctcttgttcttaaggcattggatattgacaaaagtatgcaaatctatatcgcagctggggaaatatatggtggaaaacgcagaatggcttctcttacctcggcttaccctaacgtggtgagaaaggagacacttctggaaccttcagatctcatgttctttcagaaccattcgtcgcaaatggctgctctggattacttggtatcactggaaagtgatatatttgttcccacatatgatggcaacatggctaaagttgtcgaaggacaccggaggtacatgggcttcaagaaaacaatcctgttggatagaaaacttatagttgagctggtagatcagtataccagtggatctttgcggtgggatgagtttgcttcattgatcaaggctgtccattccaaccgtatgggatcagcaaccaccagggcagcgatccctgacaggcccaaggaagaggactacttctatgccaaccctcaagaatgcttgcaaggtcccaatatgttgcaaacattgtga

SEQ ID NO: 216 - protein, 499 aa, Sorghum bicolor
MGIKAVGKLRCPSSVAAAARSSLKLWMLRATTTVLLWTCVVQFTAVGNTWTWGPRVLKGWPSCRTAREAAAVTTTTRLAMPEPVVEKAPLPPKRIYRNNGYLMVSCNGGLNQMRAAICDMVVIARSLNVTLIVPELDKTSFWNDPSEFQDIFDVEHFVISLRDEVRILRELPPRIQRRVGLGKFHSMPPISWSDISYYHKQILPLIRKYKVLHLNRTDARLANNGLPLDVQRLRCRVNYSALKFTSQIEELGRRVIRMLRQNGPFLVLHLRYEMDMLAFSGCTQGCTPKETEELTRMRYAYPWWKEKVINSFVKRKDGLCPLTPEEVALVLKALDIDKSMQIYIAAGEIYGGKRRMASLTSAYPNVVRKETLLEPSDLMFFQNHSSQMAALDYLVSLESDIFVPTYDGNMAKVVEGHRRYMGFKKTILLDRKLIVELVDQYTSGSLRWDEFASLIKAVHSNRMGSATTRAAIPDRPKEEDYFYANPQECLQGPNMLQTL

SEQ ID NO: 217 - DNA, 1194 bp, Sorghum bicolor
atgcgcgctgggatcagtgatatggtggcagttgcacgcatacttaatgctacactcattattccagagcttgataagaaatcattttggcatgacaaaagcaacttttcagatgtctttgatgaagaacacttcataaattctttagcaaatgatgtgaaagttgagaaaaaactgccaaaggagttggtgaaagctccaaaatctgttaggtacttcaagagttggtctggagtagattattaccaggatgagatctctccactgtgggaccatcgccaggtcattcgagctgctaagtcagattcccgccttgcaaacaaccaccttcctcctgacattcagaagcttcgttgtcgggcctttttccaagcactgagatttgctcccccaattgaagctctaggcaaactattggtggagaggatgaggtcatttgggccgtatattgctttgcatttgcgctatgagaaggatatgcttgcctttagtggctgcacatatggtttatcacagacagaatcagaagaacttgcagtgatcagagaaaacacaacctactggaaggtgaaagacattgacccattagaacaaagatcccacgggtactgccccttgacaccaaaggaagttggcatgtttctttctgggctggggtatccatcaagcaccccagtctacatagctgcaggggaaatatatggaggtgaatctcatatggttgatttacaatcaaggttccctattctgatgaacaaggaaaaacttgcctcagctgaggagttgcgtcctttcagccaatatgctgctcaaatggcagctttagattatattgtttccgtggagagcaatgtctttattccatcttattcggggaatatggcacgggctgttgcaggtcacaggcgtttccttggccataggaagacaatcagtcctgataggaaagcactagttcgcttgtttgacaaagtcgctagtggattactgaaggaaggggagagactatcgcaaaggataatagacatccaccagaaaaggctaggctctccacggaaacggaaaggtccggtctcaggaacaaagggcaaagacaggtttcggtcagaagaggcattttatgaaaacccttttcctgactgcctgtgtcaaccagggtctccagccagcgatgattctcttgtcagcatctaa

SEQ ID NO: 218 - protein, 397 aa, Sorghum bicolor
MRAGISDMVAVARILNATLIIPELDKKSFWHDKSNFSDVFDEEHFINSLANDVKVEKKLPKELVKAPKSVRYFKSWSGVDYYQDEISPLWDHRQVIRAAKSDSRLANNHLPPDIQKLRCRAFFQALRFAPPIEALGKLLVERMRSFGPYIALHLRYEKDMLAFSGCTYGLSQTESEELAVIRENTTYWKVKDIDPLEQRSHGYCPLTPKEVGMFLSGLGYPSSTPVYIAAGEIYGGESHMVDLQSRFPILMNKEKLASAEELRPFSQYAAQMAALDYIVSVESNVFIPSYSGNMARAVAGHRRFLGHRKTISPDRKALVRLFDKVASGLLKEGERLSQRIIDIHQKRLGSPRKRKGPVSGTKGKDRFRSEEAFYENPFPDCLCQPGSPASDDSLVSI

SEQ ID NO: 219 - DNA, 1767 bp, Sorghum bicolor
atgcccgaggcggcggtgcccccgccgctgccgctcctggcggcggcgagctccccggtggccgccgcgctgccgcgggcgaggcggcggcagcagcagcagcggagggggtggcggcgcccgcgcgggttgctggtctggggcgccctcgtggccttcttcttcgtcatgaactggtggatgttctcccgacttcaggacccctcggcgcgcccgcacttccggctgaggcgccacccgccccgcgcgcccgctactgtcaattcgtcgctcttgactctggaagaggtgtctggtgctgctaaggggaagagggcacatagggttatgctcacccggttgcttgctttggcaggccatgctttggcagaggcagagaccaggcctgaacctaaggatttgtgggaagagccgataaatgctactatgtggagaccgtgttctgaccaaagggattggaaagcctcagagggaaccaatggctacatcatgatcagtgctaatggtggcataaaccagcaaagagttgcgatttgtaatgcagttacaatctcgcggttgctcaatgcaactcttgtcatcccaaaattcttgtacagtaatgtgtggctggacaaaagtcagtttggcgatatatatcaggaggattattttatcaaatatctgaaatctgatattcagattgtaaaggatcttccagtagagctgcagtcattagacttggaggcgattggtagccttgttaatgatacagatgtcatgaaagaggcaaagcccagtttatatgtgaaaaaaatactaccaattttactgagaaacagagttgttcactttataggatttggcaatcgcttatcttttgacccaataccttctgaccttcagagattgcgatgcagatgtaattttcatgctcttcgctttgtacacaaaattcaagaaactggtgcagttcttgtagagaggttgcatggccgtagggcctcttcgtcgcctttgaaggataatcttttaggccagtttgccatcaagtctgaccccagtgcgaacaagagtgatgcatccaaatatctggctgttcatctccggtttgagattgatatggttgcatactcattgtgttactttggtggtggcaaagatgaggaagacgaactagaagcttatcgccaaattcactttcctgttctgtcagaactcaagaagacaacaaagttgccctctgctgctttcttacggtctgaaggcaaatgtccccttgcacctgaagaggctgtgcttatgcttgctgctattggtttcaagcgcagcacaaagatatacattgcaggcgctgaaatttatggagggaaggataggatggctgccataagtcgtctttatcctgctttagtaactaaagaaacccttctgtctccatcagagcttgaaccatttaggaacttctcatctcagttggcagccctggacttcattgcatgtgcagctgccgatgcatttgctatgactgacccaggaagtcaattctcttctcttgttcaaggttaccgcatgtactatggtggtggggaccttcccacaataaggccaaacaagcgccggctagccagcatacttgtgaagaatgccacgattgagtggaatgaatttgaaagtagagtaagaaaactcatacatcaaactaagcaagttcatgagaggcctgttgcaagaagcatatttagacatccacgatgttcagaatgcatgtgcagaacagagcaatag

SEQ ID NO: 220 - protein, 588 aa, Sorghum bicolor
MPEAAVPPPLPLLAAASSPVAAALPRARRRQQQQRRGWRRPRGLLVWGALVAFFFVMNWWMFSRLQDPSARPHFRLRRHPPRAPATVNSSLLTLEEVSGAAKGKRAHRVMLTRLLALAGHALAEAETRPEPKDLWEEPINATMWRPCSDQRDWKASEGTNGYIMISANGGINQQRVAICNAVTISRLLNATLVIPKFLYSNVWLDKSQFGDIYQEDYFIKYLKSDIQIVKDLPVELQSLDLEAIGSLVNDTDVMKEAKPSLYVKKILPILLRNRVVHFIGFGNRLSFDPIPSDLQRLRCRCNFHALRFVHKIQETGAVLVERLHGRRASSSPLKDNLLGQFAIKSDPSANKSDASKYLAVHLRFEIDMVAYSLCYFGGGKDEEDELEAYRQIHFPVLSELKKTTKLPSAAFLRSEGKCPLAPEEAVLMLAAIGFKRSTKIYIAGAEIYGGKDRMAAISRLYPALVTKETLLSPSELEPFRNFSSQLAALDFIACAAADAFAMTDPGSQFSSLVQGYRMYYGGGDLPTIRPNKRRLASILVKNATIEWNEFESRVRKLIHQTKQVHERPVARSIFRHPRCSECMCRTEQ

SEQ ID NO: 221 - DNA, 1542 bp, Sorghum bicolor
atggggtggaaggtggcgtcagggggtaaggcggcggccccggcggcgcccggcggcgacaagctcaggttccctccctcctcctccgccgccgccgcgcggtcgcggatgaagctctggctcgtgcgcgccaccaccacggtgctgctctggacctgcgtcgtgcagctcaccgccgtcggggatacctggggcccaagggtgctcaagggctggccatcctgcctcacgccgcacgacgaggaggcggccgccgccgccgcgcgcccgcggcatcctctcgtcgtcgacagggccgccgcgctgccgctgccgcccaaaagaatatataggaacaatggttacttgatggtgtcttgcaacggtgggcttaaccaaatgagagctgcaatatgtgatatggttgtaattgcaagatatttgaatgtaactttagttgtgccagagttggataagacttcattttggaatgatccaagtgagttccaagatatatttgatgtcgagcactttataacctcattacgaggtgaagttcgcattctgagagaattacccccaagggtaaagagaagagttgaacttggaatgttccattccatgccaccaattagttggtctgatatctcctactatcaaaatcagattcttcctttgattcgtaagtacaaggttctccatctgaatcgaactgatgccaggctagcaaacaatggtttaccaatggagattcagaaactgcgatgccgagtaaattatgcctctctcagatttaccccacaaattgaagagttgggcaagcgagtaattagaattcttcgccaaaatggacctttcttggtgcttcatttacgttatgaaatggatatgctggccttttctggctgtactcaaggttgcagtacggaagaggcagaagaactcacaagaatgaggtatgcttatccatggtggaaagaaaaagtgattgactcagacttgaaaagaaaagatggcctttgcccattgacacctgaggagactgctcttgtcctcagagcacttgacatcgatagaagtatgcaaatatacattgctgctggggaaatatacggtggaaagcgcaggatggctgctctaacttcagcttacccgaatgtggtgaggaaggagacacttttggagccttctgatctgatgttcttccagaaccattcgtcacaaatggcagcactggattacttagtatctttagaaagtgatatatttgttccaacatatgatggcaatatggctaaagttgttgagggtcaccggagattcatgggttacaagaagacagtcttgttagaccgaaaactcattgttgagctagtggaccggtacacaaatggttctctgcgatgggatgagttctctgcattgatcaaggttgcgcacgcaaagcggatgggatcagcttcaaagaggatggtgattcctgacagacccaaggaagaggactatttctatgccaatccccaagaatgcctccaggatcgtgattttttgcaaacctcataa

SEQ ID NO: 222 - protein, 513 aa, Sorghum bicolor
MGWKVASGGKAAAPAAPGGDKLRFPPSSSAAAARSRMKLWLVRATTTVLLWTCVVQLTAVGDTWGPRVLKGWPSCLTPHDEEAAAAAARPRHPLVVDRAAALPLPPKRIYRNNGYLMVSCNGGLNQMRAAICDMVVIARYLNVTLVVPELDKTSFWNDPSEFQDIFDVEHFITSLRGEVRILRELPPRVKRRVELGMFHSMPPISWSDISYYQNQILPLIRKYKVLHLNRTDARLANNGLPMEIQKLRCRVNYASLRFTPQIEELGKRVIRILRQNGPFLVLHLRYEMDMLAFSGCTQGCSTEEAEELTRMRYAYPWWKEKVIDSDLKRKDGLCPLTPEETALVLRALDIDRSMQIYIAAGEIYGGKRRMAALTSAYPNVVRKETLLEPSDLMFFQNHSSQMAALDYLVSLESDIFVPTYDGNMAKVVEGHRRFMGYKKTVLLDRKLIVELVDRYTNGSLRWDEFSALIKVAHAKRMGSASKRMVIPDRPKEEDYFYANPQECLQDRDFLQTS

SEQ ID NO: 223 - DNA, 1683 bp, Sorghum bicolor
atggccgagctgcggcacgccacggcggcggcggcggcggcgacccgcgccaccagctctccatccaagcgcgacgccgaggcggcgtcggcgtcctcgcccttggtcgcgtccccccgcgtcggcggcggcggcggcaaggacgggctccgcccccaccagaggtggtcactcccgccccctgtccgctccctcctcgcgctcgaggaccccaggtcccccgccgcctccgcctcctaccggatcctcgtcgccgcaatcgcctgcttcgcgctcgctgcgctcttctccgcaccttccgtctgggcacgcctcaacgcgccgtacctgtgccgcaaggaggggattcggctccattgccccagggtcagccagcgggactctctgtgggagaatcctcatgcagcagcaacttcgtggaagccgtgtgctgagcgtcagagccatgaggtctcagacctcgtgtcagagaatgaaacttctgggtttatatttattcacgctgagggtggattaaaccagcaacgtatagctatatgtaatgctgttgcaattgctaagataatgaatgctacacttattctaccagtgctaaagcaggaccagatatggaaagatcaaacgaaattcgaagacatctttgatgtagaccattttataaattatttgaaggaggatgtgcgcattgttcgagatattcctgactggtttacagaaaaggatgagcttttcactagtataaagcgcactgtgaaaaatgtcccaaagtatgcatcagcacaattttatattgacaatgtgcttccaaggatcaaagagaaaaagataatgtctatcaagccgtttgttgataggttaggatatgataatgttccaacggagattaaccgactgaggtgccgagttaattatcatgctttgaagtttctacctgacattgaagaaatggctgacaagctagcaacaaggatgaggaatcgaacaggaagtttaaatccatacatggctcttcatttgcgatttgagaaaggaatggtgggcctttcattttgtgattttgctggaactagggaggagaaagctatgatggctacttacagacagcagcaatggccaaggcggtacaagaatggatctcacttatggtcactagcactagaaaagagaaaagaaggtcgctgcccccttgagcctggggaaataggaattattttgcgtgcgatggggtatacgaaggaaactcagatatatgttgcatcagggcaggtgtatggtggaaacaacagaatggcacccttgaggaatatgttccccaatctggttagcaaagaagatcttgcaagcaaggaagagatggagcctttcaagaagcatgtaaccagccttgctgcgttggacttcctggtatgcttgaagtcagatgtgttcgtcatgacccacggtggcaatttcgccaagctgatcattggctaccgtcgctacatgggccgccacaggctcaagtcaatcaagccagacaagggtctcatgtccaagttctttggtgacccttacatgccgtgggcgactttcgtggaggacgtgatgatcacccatcagacacgaacgggcctccccgaacccaccttcccgcactatgacctatgggagaaccctctcaccccttgcatgtgtagggcttaa

SEQ ID NO: 224 - protein, 560 aa, Sorghum bicolor
MAELRHATAAAAAATRATSSPSKRDAEAASASSPLVASPRVGGGGGKDGLRPHQRWSLPPPVRSLLALEDPRSPAASASYRILVAAIACFALAALFSAPSVWARLNAPYLCRKEGIRLHCPRVSQRDSLWENPHAAATSWKPCAERQSHEVSDLVSENETSGFIFIHAEGGLNQQRIAICNAVAIAKIMNATLILPVLKQDQIWKDQTKFEDIFDVDHFINYLKEDVRIVRDIPDWFTEKDELFTSIKRTVKNVPKYASAQFYIDNVLPRIKEKKIMSIKPFVDRLGYDNVPTEINRLRCRVNYHALKFLPDIEEMADKLATRMRNRTGSLNPYMALHLRFEKGMVGLSFCDFAGTREEKAMMATYRQQQWPRRYKNGSHLWSLALEKRKEGRCPLEPGEIGIILRAMGYTKETQIYVASGQVYGGNNRMAPLRNMFPNLVSKEDLASKEEMEPFKKHVTSLAALDFLVCLKSDVFVMTHGGNFAKLIIGYRRYMGRHRLKSIKPDKGLMSKFFGDPYMPWATFVEDVMITHQTRTGLPEPTFPHYDLWENPLTPCMCRA

SEQ ID NO: 225 - DNA, 1713 bp, Vitis vinifera
atgattcgcactttcctcttcacatccacacagaaaacaccggttaggaagctgccacccccttctttgaagcttatccaaggtgaggatcttcccccacgaagcttcccaagcaaaaaaagatacttttgttggcaccttatccatccaaatgcggctggagatgcattgcgaaggagatatgggtataggcagccgctgaagcagctgagttggggagtgaagggattcataggacggctttcagtgtcattaatcatcctattgatctgcagtgtctttttcttaagctttggtcccaactcttccaacagcagagtggagcaggtaaatgtggatgatctttggggcactgctgcttctggtgattggagaccatcatcagctccacgttctgactggccccctcctcctctcgagggtaatggttatttgcgtgttcgttgtaatggtggtctgaatcagcagcgtagtgcaatttgtaatgctgttcttgctgcacgaatcatgaatgccacccttgtattacctgaattagatgcaaacgccttctggcatgatcatagtggctttgaaggtatttatgatgttgagcatttcatcaagtcactgaggtatgatgtaaggattgttgaaaaacttcctgaaattaccaaaaatgggaagaccaagaagataaaagggtatcagcttcggcccccaagagatgctcctattagttggtatttaacagaagcattggagaagatgaaagaacatggtgctatatatctcactccattttcacatcgcttggaagaagaaatagacaatcctgaataccagagattgagatgcagagttaattatcatgctctcagatttaaaccacacatcatgaaattaagtaactcagttgttagcaaactgcgcgcacaaggtcacttcttggcaatacatcttcggtttgagttggatatgcttgcttttgctgggtgctacaatatatttacccctgaagagcagggaatattgaagaaataccgggaggaaaatttcaaagataagccacttgattatgagcaaataagagccaatggaaaatgcccattaactccagaagaggttggtctgatctttcgtgctatgggatttgacaattccacccgaatatatctcgcagcaggtaaaatctttggaggggagcgctacatgaagccatttagagcattattccctcagcttgagaaccacaacacagtggctggcacagaagagattgctgagaacacactgttgggctctgctgttgattacatggtttgtctcctttctgacattttcatgccaacttacgatggcccaagcaactttgccaataatctcatgggtcaccgcctgtactatggcttccgaaccacaatcacgccagacaggaaagctctagctcccatcttcattgctcaggaaaatggccgtacctctggttttgaagctgcagtcaggcgtgttatgttcaattcaaagcttggtggccctcacaagcgggtccatcctgaatctttctatacgaactcttggcctgagtgtttctgccaaacatcaccaaaaaatcgaggccataagtgccctctggagaatgtaatggaaatcctcaacagccggatgcagagtgatgaaactgatacagcagaatctgaagtcacatcaaatttcacaagttccatttcttaa

SEQ ID NO: 226 - protein, 570 aa, Vitis vinifera
MIRTFLFTSTQKTPVRKLPPPSLKLIQGEDLPPRSFPSKKRYFCWHLIHPNAAGDALRRRYGYRQPLKQLSWGVKGFIGRLSVSLIILLICSVFFLSFGPNSSNSRVEQVNVDDLWGTAASGDWRPSSAPRSDWPPPPLEGNGYLRVRCNGGLNQQRSAICNAVLAARIMNATLVLPELDANAFWHDHSGFEGIYDVEHFIKSLRYDVRIVEKLPEITKNGKTKKIKGYQLRPPRDAPISWYLTEALEKMKEHGAIYLTPFSHRLEEEIDNPEYQRLRCRVNYHALRFKPHIMKLSNSVVSKLRAQGHFLAIHLRFELDMLAFAGCYNIFTPEEQGILKKYREENFKDKPLDYEQIRANGKCPLTPEEVGLIFRAMGFDNSTRIYLAAGKIFGGERYMKPFRALFPQLENHNTVAGTEEIAENTLLGSAVDYMVCLLSDIFMPTYDGPSNFANNLMGHRLYYGFRTTITPDRKALAPIFIAQENGRTSGFEAAVRRVMFNSKLGGPHKRVHPESFYTNSWPECFCQTSPKNRGHKCPLENVMEILNSRMQSDETDTAESEVTSNFTSSIS

SEQ ID NO: 227 - DNA, 1089 bp, Vitis vinifera
atgcagtgccttcttgcccacttcaggtttatcatcgccgtcatcgtgtcgctgttcctccttctttggctgaagtacctgctgactcatttcctatcccttcggcttctcctacctcggctctgcctccttttgctgacttacccattgctcttcggaaagattctgccacttttcagtaaatacaaggtgatacaattcaacaaaacagatgcacgcttggcaaacaatgggctcccacttgatcttcagaaactcaggtgtcgtgttaatttccaggcactgaaattcactcctcaaattgaggctttggggcacaaattggttcatattcttcaggaaaagggaccttttgtagctttgcatttaagatacgagatggacatgctggctttctcaggttgtactcatggctgcactgaggaagaagctgaggaactcaagcagatgaggtatgcatatccttggtggagagagaaagagatagtgtctgaagagaggagattacaaggtttgtgccctctcacaccagaggaggtggctttagttatgcaagcactgggttttgataagggcatacagatctatattgcatctggtgagatttatggcagtgaacagagactggcagcactaagagcagcatttccaaagattgtgaaaaaggaaatgctgctaggcccagaagaattgcagcaattccagaatcattcctctcaaatggcagccctggatttcatggtttctatttccagtaatattttcatccccacctacgatgggaacatggcaaaacttgtggaaggccaccgcaggtaccttggatttagaaaatccatcctactccatcgaaaagcacttgtggaattgctagatttgcatcagaatgggactctttcgtggagtgagtttgaagtttctgtccggcgggcacatgaccaaaggatgggacaaccaactcgtcgaagagttattccagacaagcgcaaggaggaagattatttttatgcaaatcctcaagagtgcctctgcgagagagcaaattgtgatgacctactaggccctagcaacctaagtacagtgcggtga

SEQ ID NO: 228 - protein, 362 aa, Vitis vinifera
MQCLLAHFRFIIAVIVSLFLLLWLKYLLTHFLSLRLLLPRLCLLLLTYPLLFGKILPLFSKYKVIQFNKTDARLANNGLPLDLQKLRCRVNFQALKFTPQIEALGHKLVHILQEKGPFVALHLRYEMDMLAFSGCTHGCTEEEAEELKQMRYAYPWWREKEIVSEERRLQGLCPLTPEEVALVMQALGFDKGIQIYIASGEIYGSEQRLAALRAAFPKIVKKEMLLGPEELQQFQNHSSQMAALDFMVSISSNIFIPTYDGNMAKLVEGHRRYLGFRKSILLHRKALVELLDLHQNGTLSWSEFEVSVRRAHDQRMGQPTRRRVIPDKRKEEDYFYANPQECLCERANCDDLLGPSNLSTVR

SEQ ID NO: 229 - DNA, 882 bp, Vitis vinifera
atggaggttagatctgagggtagtttacaggtgaggtgcgataagcttccagctccggtgattccaaggactcgtcttcaggtgtggtttattcgtgtgtgctccagcattttgctatggacgtgtctggtgcagttggttgcagtgggggagctatggcatccgcgtttgctaactggaatatcatcccacttatctcggataactccgtatcctttgcacgtcgaaaaggctattttatcgcctcctcctcggagctaccaaagcaatggttttcttagagtttcttgcaatgggggcttgaaccaaatgcgggctgcgatctgtgacatggtcactgttgctcggtttttgaatctcactctagtagtcccagaacttgataagacatctttctggtcggaccctagtaattttgaggatatctttgatgtgagacacttcattgaatcactaagagatgaagttcgcattgtcaaaaggctgcctaagaggttcagcaggaagtacggatacaagcaacttgccatgccccctgtcagctggtcaaatgaaaaatattactctgaacaggtttctcatttattgattgttgatgatactctggttttctgtgaggcctctcaggatcatataacttatttatgttggttatttatatggtttgaggccatttcagggttgagaattaatttggaggaaagtgagttgattctggttggacggttggaaaatgtcgatgatttactggttaagcttcggtgtagggtgagtagtcttcctttttctttgggacttcctttgggtgctctgtttaagtctacaggagtttgggatggagtagaagagcggtctcgtaaaaggttgtctatgtggaagtga

SEQ ID NO: 230 - protein, 293 aa, Vitis vinifera
MEVRSEGSLQVRCDKLPAPVIPRTRLQVWFIRVCSSILLWTCLVQLVAVGELWHPRLLTGISSHLSRITPYPLHVEKAILSPPPRSYQSNGFLRVSCNGGLNQMRAAICDMVTVARFLNLTLVVPELDKTSFWSDPSNFEDIFDVRHFIESLRDEVRIVKRLPKRFSRKYGYKQLAMPPVSWSNEKYYSEQVSHLLIVDDTLVFCEASQDHITYLCWLFIWFEAISGLRINLEESELILVGRLENVDDLLVKLRCRVSSLPFSLGLPLGALFKSTGVWDGVEERSRKRLSMWK

SEQ ID NO: 231 - DNA, 1575 bp, Vitis vinifera
atgaggactcgtcccctttcttgcccgacaacccaacggaccactacgatcgtcactcctcacgagatcgggatcgcgaccgtcccttctggtccaattttcactccatatcctagggtttctccacataactacaagatctcgcttttctggatccttctcgtcattctcgtcggattcatctcaatttctgctattttgaatggtttgaattctccatacttgtgtagaaaagatggcattgttcttcgctgtccgcgtgtcaaggaacctccttcactctggggcaatcctttttctgccaccacctcttggaagccttgtgctgagcgccgcaatggtggaatatcagatcttcctcctgagaatgaaacaagtggctatatatttatccatgcagagggtggcctaaatcagcaaagaattgctatatgcaatgcggtggctgtggctaaaataatgaatgccacacttattttgccattgctgaagcaggatcaaatctggaaagaccaaacgaaatttgaagatatttttgacgtggaccatttcattgattacttgaaggatgatgtgcgaattgtccgtgatatccctgagtggttcacagacaaatcagagctattaacaagcataagacgaacggtaaaaaacattccgaagtatgctccagcacagttttacattgataatgttctgcctcggatcaaggaaaagaagataatggccctaaaaccttttgttgatcggcttgggtatgataatgttcctccagaaatcaacaggctaaggtgcagagtaaactatcatgctctgaaatttcttcctgagattgagcagatggctgatcaactggcatcaaggatgagaaaccgcactggcagttcaaatccttacatggcccttcaccttagatttgagaaagggatggtaggcctatcgttctgtgattttgtgggcacaagagaagagaaagctcagatggctgaatacaggaaaaaagaatggcctcgacggtacaagaacggttcccatctatggcagcttgccctgcagaaacggaaggaaggacgttgccctcttgagcctggggaagtggcagtgattcttcgggcaatgggctatcctaaagaaactcaaatttatgttgcttctggaaaggtctatggtgggcaaaaccggatggcaccactcaggaacatgttcccaaatctggttacaaaggaagagttggcaaccaaagaggagttggatggtttcaggaagcatgtgacaagcttagcagccctggacttcctggtttgcttgaagtctgatgtatttgtgatgacccatggaggcaactttgcaaaactgataattggtgctcgtaggtacatgggtcatcagcttaaatctataaaaccggacaaggggctcatgtccaaatcttttggggatccttacatgggctgggccacctttgtggaggatgtggttgtcacccaccagacacgaacgggattgcctgaagaaactttcccaaattatgacctctgggagaaccctttgactccttgcatgtgtagagcctga

SEQ ID NO: 232 - protein, 524 aa, Vitis vinifera
MRTRPLSCPTTQRTTTIVTPHEIGIATVPSGPIFTPYPRVSPHNYKISLFWILLVILVGFISISAILNGLNSPYLCRKDGIVLRCPRVKEPPSLWGNPFSATTSWKPCAERRNGGISDLPPENETSGYIFIHAEGGLNQQRIAICNAVAVAKIMNATLILPLLKQDQIWKDQTKFEDIFDVDHFIDYLKDDVRIVRDIPEWFTDKSELLTSIRRTVKNIPKYAPAQFYIDNVLPRIKEKKIMALKPFVDRLGYDNVPPEINRLRCRVNYHALKFLPEIEQMADQLASRMRNRTGSSNPYMALHLRFEKGMVGLSFCDFVGTREEKAQMAEYRKKEWPRRYKNGSHLWQLALQKRKEGRCPLEPGEVAVILRAMGYPKETQIYVASGKVYGGQNRMAPLRNMFPNLVTKEELATKEELDGFRKHVTSLAALDFLVCLKSDVFVMTHGGNFAKLIIGARRYMGHQLKSIKPDKGLMSKSFGDPYMGWATFVEDVVVTHQTRTGLPEETFPNYDLWENPLTPCMCRA

SEQ ID NO: 233 - DNA, 1449 bp, Vitis vinifera
atgtggacttcgaggttatcgaaattctactatggttgcagtaatgctagcgttaagttctccaaagttggtgtcagcacacaacggaatagatacttgttgattgctaccagtggaggcttaaatcaacaaagaacagggataacagatgcagttgttgcagctcgtattttgaatgccactcttgttgttcccaagttggaccagaaatctttttggaaggatagcagcaactttgctgaaatctttgatgcggattggtttatttcatttctatcaaaagatgttaaaatcattaaacagcttcctaaagagggaaggaagattatggctccatataccatgcgtgttccaaggaagtgcactccaagttgctatcagaaacgtgtcttacctgttctcactaaaaagcatgctgttcagctcactaagtttgattataggctttcaaataggctggacatggatttacaaaagctgagatgcagagttaactaccatgctttgaaatttaccaattcaattcttgaaatgggtaaaaagttggttgagaggatgaggatgaaaagcaagcatttcattgccctgcatttgaggtttgaacctgatatgcttgcattctctggatgctattatggtggaggagaaaaagaaaggacagaactgggcgcattaaggaagaggtggaaaactttacatatacgcaaccctgataaggaaaggaggcagggaaaatgccccctcactccagaggaagttggtcttatgctgagagcattgggttttggtagtgatgttcacatctatgtggcatctggtgaagtatacggaggtgaaacaacattagcacccctcaaggcactcttcccaaatttccattcaaaagatactatagccagtgaggaagagctggccccattttcgtccttttcttctcgtatggctgccctagacttcattgtttgtgatgaaagtgatgtttttgtcaccaacaacaatggcaacatggctagaatgttggctggacgaaggagatactttggccataaacccacaatccgacccaatgctaaaaagctctatcgcttgttcatgaatcgaaataacatgacatgggaagagtttgcctctggggtgcgaagtcgtcaaattggcttcatgggggagccaaatgaggtaaggcctggcaggggcgagtttcatgaaaacccgtcctcctgcatatgtgaacttcctgaagccaaggccagaggagatttaggttctaaagatagtgaacaggcggatgagcagccaactgaggatgagcatgattggattgatatggactattcagagaatgaaaatggccttcaagggaaagggtccctcaacctaacagactcagatttgggcggtcttctcaaggccgatccccagccagaattggaagagatgttctcggactag

SEQ ID NO: 234 - protein, 482 aa, Vitis vinifera
MWTSRLSKFYYGCSNASVKFSKVGVSTQRNRYLLIATSGGLNQQRTGITDAVVAARILNATLVVPKLDQKSFWKDSSNFAEIFDADWFISFLSKDVKIIKQLPKEGRKIMAPYTMRVPRKCTPSCYQKRVLPVLTKKHAVQLTKFDYRLSNRLDMDLQKLRCRVNYHALKFTNSILEMGKKLVERMRMKSKHFIALHLRFEPDMLAFSGCYYGGGEKERTELGALRKRWKTLHIRNPDKERRQGKCPLTPEEVGLMLRALGFGSDVHIYVASGEVYGGETTLAPLKALFPNFHSKDTIASEEELAPFSSFSSRMAALDFIVCDESDVFVTNNNGNMARMLAGRRRYFGHKPTIRPNAKKLYRLFMNRNNMTWEEFASGVRSRQIGFMGEPNEVRPGRGEFHENPSSCICELPEAKARGDLGSKDSEQADEQPTEDEHDWIDMDYSENENGLQGKGSLNLTDSDLGGLLKADPQPELEEMFSD

SEQ ID NO: 235 - DNA, 1299 bp, Vitis vinifera
atgcaagatgaactttggaatgctccatccagccatggtttacacccttgtgtcaagcctacttctaaatataaagccacccaaggatgggatcgttatatgacagtaaaaagcaatggaggactaaatcagatgcgtactggtatatctgatatggtggctgtggcacgcataatgaatgcaactctagtaattcctcaactggatagacgctcattttggaaagattcaagtacgtttgctgatatatttgatgaacttcatttcatgacaaccttgcaaggggatgtgaggattgtcaaagagctccctaggcagttggagtctgttcctcgagctcggaagcacttcacatcctggtctagtatgggctactatcaggagatgacacatttatgggaggaatatcaggtgattcatgttgcaaaatctgattctcgacttgcaaacaatgatttgcctattgatatccaaaggttgagatgtcgtgctttataccatgctctccgtttctctcctcaaatagagaacctgggaaagaagctggtggagcggctgagatcacgcggtagaagatacattgctcttcatctgagatatgagaaagacatgctttcatttactggttgtacttatggtctcacagatgccgaatctgaagagctgagaataatgagggagaacacaaaccattggaagatgaagaagataaatgcaacagaacagagaataggaggcttctgtccgctaactccgaaggagattggaatatttcttcgagctcttggttatcttccatcgacattaatttatattgcagctggtgaaatctatggtggtgatgctcgccttgtagagctcaaatcccgctttccgaatttaattttcaaggaaacaatagcaactcaggaagaattgaaagcatttgcccatcattcgtctcaaactgcagcacttgattacattatctctatagaaagtgatgtgttcattccttcacattcgggtaacatggcaagagccgttgaggggcatcgcagattcttgggtcacggcaagacaatcaccccagacaggaaaggacttgttgacatttttgataaactggaggcaggacagctaaaagaaggatcatcattatcatatctagtgacacagatgcacaagaataggcaaggagctccaaggaaaagaggaggttcactgccaggagttaaaggccgagcacggtttagaactgaggaatccttctatgaaaatccatacccagagtgtatatgtagttcaaagaaacattag

SEQ ID NO: 236 - protein, 432 aa, Vitis vinifera
MQDELWNAPSSHGLHPCVKPTSKYKATQGWDRYMTVKSNGGLNQMRTGISDMVAVARIMNATLVIPQLDRRSFWKDSSTFADIFDELHFMTTLQGDVRIVKELPRQLESVPRARKHFTSWSSMGYYQEMTHLWEEYQVIHVAKSDSRLANNDLPIDIQRLRCRALYHALRFSPQIENLGKKLVERLRSRGRRYIALHLRYEKDMLSFTGCTYGLTDAESEELRIMRENTNHWKMKKINATEQRIGGFCPLTPKEIGIFLRALGYLPSTLIYIAAGEIYGGDARLVELKSRFPNLIFKETIATQEELKAFAHHSSQTAALDYIISIESDVFIPSHSGNMARAVEGHRRFLGHGKTITPDRKGLVDIFDKLEAGQLKEGSSLSYLVTQMHKNRQGAPRKRGGSLPGVKGRARFRTEESFYENPYPECICSSKKH

SEQ ID NO: 237 - DNA, 1413 bp, Vitis vinifera
atgtttaaacagattgacttggaagcactttggggacctgctgattctagtggttggaggccgtcctctgctccacgatctgattggccctctccaccaagtgagagcaatggttatttgcgagttcgttgtaatggtggtttaaatcaacagcgcactgcgatctgtaatgctgttcttgctgcacgaatcatgaatgctacacttgtgctgcctgagttggatgcaaactccttctggcatgatagcagtggttttcaaggtatatatgatgttgagcattttattgcggtactgaggtttgatgtacggattgtggaaagcattcctgaaacacgcaaaaatgggaaaaccaagaagataaaagcttatcaacttcgcccccctagagatgcccccatcagttggtatgcaacagatgctctgaagaagatgaaggaacatggtgccatttacctaactcccttttcacaccgtttggcagaagaaattgacaaccctgaataccaacgcttgaggtgcagagttaattatcatgctctcagatttaagccacatattatgaagttaagcaatacaatagtcaacaaacttcgtgcacaaggtcacttcatgtcaatacatcttcggttcgagatggatatgcttgcatttgcaggatgcttagatatctttacccctgaagagcaacgtatattaaccaagtaccggaaagaaaattttgcagcaaaaagacttgtttatcatgaaagaagggccattggaaaatgcccattaactccagaagaggttggtcttgttttacatgcactagggtttgacaattctaccaaaatataccttgcagctggtgaactgtttggtggggagcgcttcatgaaaccttttcgagctctattcccacgccttgagaaccacagcagtgtggaaccggcagatgagcttttagagaactcccagggcttggtaggctctgctgtggattacatggtttgtctgctatctgacattttcatgccaacttatgatggcccgagcaactttgccaacaatctcctaggtcaccgactttactatggatttcggaccacacttcggcctgataggaaagctcttgccccaatcttcattgatcgtgaaaatgggcggttggctggttttgaagaagctgttaggcgtgtgatgctcaacacaaattttggtggaccccacaagcgtgtcccacctgagtctttctatacaaactcatggccggaatgtttctgtcaaatgtcaccaaagaatcctgctgacaaatgtccacctgagaacgttctggaaatcctaaacaaccgcttggagagtgaaatgggcaatggctttgaatcaacaaccacatcaaatttgacagtgcctacggaagaagaacaatga

SEQ ID NO: 238 - protein, 470 aa, Vitis vinifera
MFKQIDLEALWGPADSSGWRPSSAPRSDWPSPPSESNGYLRVRCNGGLNQQRTAICNAVLAARIMNATLVLPELDANSFWHDSSGFQGIYDVEHFIAVLRFDVRIVESIPETRKNGKTKKIKAYQLRPPRDAPISWYATDALKKMKEHGAIYLTPFSHRLAEEIDNPEYQRLRCRVNYHALRFKPHIMKLSNTIVNKLRAQGHFMSIHLRFEMDMLAFAGCLDIFTPEEQRILTKYRKENFAAKRLVYHERRAIGKCPLTPEEVGLVLHALGFDNSTKIYLAAGELFGGERFMKPFRALFPRLENHSSVEPADELLENSQGLVGSAVDYMVCLLSDIFMPTYDGPSNFANNLLGHRLYYGFRTTLRPDRKALAPIFIDRENGRLAGFEEAVRRVMLNTNFGGPHKRVPPESFYTNSWPECFCQMSPKNPADKCPPENVLEILNNRLESEMGNGFESTTTSNLTVPTEEEQ

SEQ ID NO: 239 - DNA, 1857 bp, Vitis vinifera
atgtcaagcggtggcgccaactcctgcaacggaagtcccagactcgccgggccaaccaccaccaggcgacgcgtggcggatatgatagacgccgagagatcttccaacttttcagacgtgtctgaggaagaggataaccccaacggtaacaatggcgatcaccaccaccattgccaccacccgtcaatccgttattggctgcttcgcaggaggatattcttctttgcgccggaaacgtggctgcttaagattgagaacgggtgttcgtgggcggcgacggcggtgcagtggctgagatcggggaggcacatggggcggaggatttttgtaggattattgttgttggtttttttctcggtgtttgtgaagttttcgcttatgagtagccatgtggaggcgaatgggaagagagagaatgggctgttgattatacagacgttcaaggaggattgggcaatggcgcaaaaagttgtggcggaggatgaggcttcggatgctgtcaaaccccttcgagtattggaaaagatcccgattcctgaaatttggatgaaaccaaacagtgataactatcacaaatgcattactagaccaaggaataggatacggactggttcaaagaccaatggttacctgctagttcatgccaatggtggattgaatcaaatgagaacaggaatatgtgatatggttgctgttgccaagattatgaatgccactcttgttcttccttctcttgatcatgagtccttttggacagacctgagtgattttaaagatatttttgactggaagcatttcatagaggttttaaacgatgatattgagatagttccatctttgccacagaaatatgcagcaattaagcctcttcaaaaggccccggtttcctggtcaaaggctagttactacagaggggagatgctcccactacttaagcggcataaggtaataagatttacccacactgactcacgacttgcgaataatggccttgcagcctcaatacagaggctcaggtgccgtgccaattatgaggccctccggtacaaaaaggagattgaggagcttggcaagattttgcttgaccgacttaagaaaaacaatgaaccatatattgctcttcatttaagatatgagcaagacatgcttgcattcactggatgcagccacaaccttaccacagaagaggctgagaaacttagaattatgagatacagtgtcaagcattggaaggagaaagagatagatagcaaagaacgacgacttcaaggaggatgcccaatgtcccctagagaagcagccttgttccttaaagccatggggtacccttcaactacaaccatatatatagttgctggagaaatctatggcagaaacagcatggctgcattccgttcagagtacccaaatgtcttcacacacaacactctagcaacggaagaagaattggagccctttaagccatatcagaatcgccttgctgctttggattacattttggcgctagaaagtgatgtctttgtttacacatatgacggaaatatggcaaaggcagtgcaggggcataggaggtttgaaggtttccgaaagacaatcaaccctgacaggcaaaattttgtgaggctgatcgatcagttagacggaggagctatatcatgggaaatgttttctcaggaggtgaagagtttgcacactaaccggcttggagcaccatatcttagacaggcaggagagtcaccaagactggaggagaatttttttgccaatccttttcctggctgtgtttgtaacaagtctcaggagcaaatcagtagcctaaaactttaccaggggcgcaggcgaatggttgtcttgtaa

SEQ ID NO: 240 - protein, 618 aa, Vitis vinifera
MSSGGANSCNGSPRLAGPTTTRRRVADMIDAERSSNFSDVSEEEDNPNGNNGDHHHHCHHPSIRYWLLRRRIFFFAPETWLLKIENGCSWAATAVQWLRSGRHMGRRIFVGLLLLVFFSVFVKFSLMSSHVEANGKRENGLLIIQTFKEDWAMAQKVVAEDEASDAVKPLRVLEKIPIPEIWMKPNSDNYHKCITRPRNRIRTGSKTNGYLLVHANGGLNQMRTGICDMVAVAKIMNATLVLPSLDHESFWTDLSDFKDIFDWKHFIEVLNDDIEIVPSLPQKYAAIKPLQKAPVSWSKASYYRGEMLPLLKRHKVIRFTHTDSRLANNGLAASIQRLRCRANYEALRYKKEIEELGKILLDRLKKNNEPYIALHLRYEQDMLAFTGCSHNLTTEEAEKLRIMRYSVKHWKEKEIDSKERRLQGGCPMSPREAALFLKAMGYPSTTTIYIVAGEIYGRNSMAAFRSEYPNVFTHNTLATEEELEPFKPYQNRLAALDYILALESDVFVYTYDGNMAKAVQGHRRFEGFRKTINPDRQNFVRLIDQLDGGAISWEMFSQEVKSLHTNRLGAPYLRQAGESPRLEENFFANPFPGCVCNKSQEQISSLKLYQGRRRMVVL

SEQ ID NO: 241 - DNA, 1332 bp, Vitis vinifera
atgattgccttcacagtgaaacctcttttcagcattgtggtcctcactctcacgctcgtcgttgccaccttcttgatatcccctccttcgcccttttctcaattctccctttctcccacctcacccagtcgaaaatttgatatttggagtgtgcgaaggcttgtggaatggagaccttgcaaatggtggctagatggagatttgacagctcttccagcaaagaataatggatatattagagtggattgctatggtggactcaatcaaatgaggagggatttctgcgatggtgttggcattgctcgtttgctgaatgcaactctggttttgccaaagtttgaagtcgctgcatattggaatgaatcaagtggttttgcagatgtgtttgatgtcgactacttcattcaacagatggatggctatgttaaagttgttaaagatttgccaccagagattgcatcaagagaaccttttagagtggacacaagtaaacggaaaggccggaaaggccaatttgattacattgaaagtattcttccttctttactcgaacatcattacatttcaatcacaccagcaatgagccaaagaagggacaggtatcctctgtacgccaaggctgccctctgtcaagcttgttacaatgcattacgccttaccaaagtgttggaggagaaaggtgctgaacttctgcaagccataccaaaaccatttctctcccttcaccttcgctttgaacctgatatggttgcttacagccaatgtcagtacccaagcctttcacctgcctccttggaatctgttgatgctgtccgaggagatcgaaaaccctgggctggagagatggccacaatttggagaaaccgtgggaaatgcccccttaccccgagtgagacagctttcatacttcaagcactttccattccaacagacacgaatatttatctggcagctggagatggtttgatggaaattgaaggactaacttctatctacaccaatgtatttaccaagtctagcctccttagtggcgaggatttcacaagcatgcatgggaatacaaaagctgcactggattattatgtatctatcaacagtgactcctacatagctacgtattttggaaacatggacaagatggttgcagcaatgcgagctttcaatagaatgtctaaaactgttttcttaagtagaagagcttttgctgaattcacttcgcagggattgaaagggaaggaattgatggaagccctgtggaaggttcatggtgatgattttggcatggggagaggatatgctttgccagactgcttctgtgagttcaaattgtga

SEQ ID NO: 242 - protein, 443 aa, Vitis vinifera
MIAFTVKPLFSIVVLTLTLVVATFLISPPSPFSQFSLSPTSPSRKFDIWSVRRLVEWRPCKWWLDGDLTALPAKNNGYIRVDCYGGLNQMRRDFCDGVGIARLLNATLVLPKFEVAAYWNESSGFADVFDVDYFIQQMDGYVKVVKDLPPEIASREPFRVDTSKRKGRKGQFDYIESILPSLLEHHYISITPAMSQRRDRYPLYAKAALCQACYNALRLTKVLEEKGAELLQAIPKPFLSLHLRFEPDMVAYSQCQYPSLSPASLESVDAVRGDRKPWAGEMATIWRNRGKCPLTPSETAFILQALSIPTDTNIYLAAGDGLMEIEGLTSIYTNVFTKSSLLSGEDFTSMHGNTKAALDYYVSINSDSYIATYFGNMDKMVAAMRAFNRMSKTVFLSRRAFAEFTSQGLKGKELMEALWKVHGDDFGMGRGYALPDCFCEFKL

SEQ ID NO: 243 - DNA, 1971 bp, Vitis vinifera
atggttttcaaatctaatataaaatgggtggctcttattgggctcattctttcattgttctcgctgctgctgcaccttctacttgcaaaattttcaaatgtcagtttagtggagtacagcgcattagcaggtttgcaggaaggtttacattcaaagttaggggcacagaggcataaaaagttatggggtgttgtgaagcccttggaatctttacagccttatgccaaccccagaagtagctatcctgttccaaatgagaagaacaatggttttatttatgcaaaaatttctggtggatttgagaagattagacccctgatctgtgatcttgtggccatatccaggcttctgaatgctactcttgtaattccggagattcaacaaagtactcgttcaaaaggcattagttataaattcaggagtttttcctatctctacaatgaggagcagttcatagcatcactcaaaaatgatgtaatcattgtgaaaagcctacctgaaaaattgaagtcgggaaggagaaacaatgagttccccactttcagacctaaaagttcatcttctccaagtttttatatcaaggaaatcttaccaaatttaaaaaagttcaaggttattggattgattcttactgatggagggtgcctgcagtcaatccttcctcctagcatgtccgagtatcagagacttagatgcagagttgcctttcaggcccttcacttccgcccggaaattcaagttcttgggcgccggatggtggagaggttacgggactggggccaaccattcctagcttttcatcctggcttagtgagggatgctttggcttatcatggttgtgcagaactgttccaggatgtccacactgaactaatacaatatcgaagggcccagctgatcaaacaaggaattgttaaagaagaactaagtgtagattcacacctacacaaagaaaagggcttgtgtcctctcatgcctgaagaggttggaattcttcttcgagcaatggggtatcctcctaaaacaatcatatacttggctggttctgaaacttttggtggtcagcgagttttgatccctctacgtgccatgtttgccaacttagtggatcgcacttctttgtgcagtagccaagagttgttagacttggttggacctgaaacacctctttctcttgacactttcaaatttcctcccgccaaaacagaggaacaactgaaagaagaatggaagaaggctggccctcgccctcggcctctccctccgcctccagataggccaatttatagacatgaaaaagaaggctggtatgattggatcactgagactgagactgaaccggatccttcacctatggatctaaggatggaagctcacaggttactttgggatgctcttgattatattgtatcggtggaagcagatgcattttttccgggatttaacaatgatggaattggatggccagatttttcaagcttggttatgggtcaacggctgtatgagaatccttcttccagaacatatcgaccagacaggaaaattctggccgatcttttcaacattacccgtgaaaacatgtaccatccaaagcataattggacactttcagtgcaggaacttcttaataaaagcatgggtgaggagggtcttataagggaatccctcttatcgaaaccaaactcattcctttcgcatcctcttcctgaatgctcttgtagaattccttctgatgaaattccaaatcaagtaaagggcaatgatgggcgacttctatatggaggggaagacaactgccctgaatggatgcagctggaccccggtgcaacagagaggagtaaagctgatgaggttgagttaccagactatgaaaccgatttagatgaacaacctgaaaatgatgacaccagtggcaatactaacacaaccctaccatttgatcaagacgatgaaatggatcctaatgactag

SEQ ID NO: 244 - protein, 656 aa, Vitis vinifera
MVFKSNIKWVALIGLILSLFSLLLHLLLAKFSNVSLVEYSALAGLQEGLHSKLGAQRHKKLWGVVKPLESLQPYANPRSSYPVPNEKNNGFIYAKISGGFEKIRPLICDLVAISRLLNATLVIPEIQQSTRSKGISYKFRSFSYLYNEEQFIASLKNDVIIVKSLPEKLKSGRRNNEFPTFRPKSSSSPSFYIKEILPNLKKFKVIGLILTDGGCLQSILPPSMSEYQRLRCRVAFQALHFRPEIQVLGRRMVERLRDWGQPFLAFHPGLVRDALAYHGCAELFQDVHTELIQYRRAQLIKQGIVKEELSVDSHLHKEKGLCPLMPEEVGILLRAMGYPPKTIIYLAGSETFGGQRVLIPLRAMFANLVDRTSLCSSQELLDLVGPETPLSLDTFKFPPAKTEEQLKEEWKKAGPRPRPLPPPPDRPIYRHEKEGWYDWITETETEPDPSPMDLRMEAHRLLWDALDYIVSVEADAFFPGFNNDGIGWPDFSSLVMGQRLYENPSSRTYRPDRKILADLFNITRENMYHPKHNWTLSVQELLNKSMGEEGLIRESLLSKPNSFLSHPLPECSCRIPSDEIPNQVKGNDGRLLYGGEDNCPEWMQLDPGATERSKADEVELPDYETDLDEQPENDDTSGNTNTTLPFDQDDEMDPND

SEQ ID NO: 245 - DNA, 1890 bp, Vitis vinifera
atggggaagcaggggtctccaagaagtcctcgtcctaaatctgttggtgctgatttatcattggggatgaaagaatatcagggtagatgcccggaaactctaccgggaagtgatccttctcttgggaggagaatatcagggggagattacaactggaacagaaatttgctgcttcatgggttgaaaaatgagccagcaaaatttggggcttgtaagggagtttatgtagggaaaaagcatacatggtttcgtaagcatgtgaggtcggttgtttttatgtttgggctgatgggtttccttttcctgcttgattcccttatggtctctatttttgattcaatgaatcttcagggcagttccgccccaatcaaatcaagtggcctaaaggaggataagagttatcccaatgaagaaaaatcacctgtactgatgtatgatcggcttctaaatttggcttctagtgcccttgcagagaaagaattcaagcaagattcattgaatttctgggaagagccatatcggcatgcatctgtatggaaaccctgtgcagatagaaaaagttcaaaaattatagggaagtctgaaaaaagtaatggctttatgttggtcagtgcaaatggtggtctcaatcaacagagggttgctatttgcaatgctgttgctgtggcttctcttcttaatgctactctagttctccccaaatttctttacagcaatgtgtggaaggatcctagccagtttggtgatatttatcaagaggattatttcattaatatcatgaaggatgaactagaaattgtaaaggagctccctcctcatttggagtcactagacatggaagcaattggcagtctaattacagatgctgatattccgaaggaggcaaaacccatagaatatgtccaaaaagtacttcctctcttattaaggaatggtgttgtccactttcttggatttggaaatcgactcggctttgatccattgccttttaagcttcagaggttaagatgcaaatgtaactttcatgctctgaagtttgtgccaaaaattcaacgagttggttcgttattggttcaaaggataagaaaatatgatgctgcaaagagtaggttagataaacaactgcttggaaacttcatgtccaacattcccttgaaagagaaccatgctgaagggggcccatccaaatatcttgctttgcacttgagatttgaagtggatatggtggcatactccctatgtgaatttggaggtggagaaaatgagcaaaaggaacttcaggcctacagagaaactcattttcccctgcttattgagcgcttgaagaatgtgaaacctgtttcccctacacaacggagaaagttggggaaatgtccattgacaccagaagaagcagcactagttctttctggtcttggttttaagcggggaacttacatctacctggctgggtctcatatatatgggggacagtctagaatgcatccattcactaacctttatcccaatttggtcacgaaggaggatctcctctcacccggtgaactcgaaccttttaggaatttctcttcccagctggcagctctggactttattgcctgtgcaactgctgatgtgtttgccatgactgactctgggagccaattatcatccttggtgtcggggttccgaacgtactatggtggtggacgtgctcccaccttgaggcctaacaaaaagaggctagcagcaattttgatggagagtaggaccatagaatggaagagttttgaagaaagagtaaaaaagatgatcgaggagggtcaaagggtgcgggtgaggggttttggtcgaagcatttatcgacagccaaggtgcccccaatgcatgtgcaagtcccacttacattga

SEQ ID NO: 246 - protein, 629 aa, Vitis vinifera
MGKQGSPRSPRPKSVGADLSLGMKEYQGRCPETLPGSDPSLGRRISGGDYNWNRNLLLHGLKNEPAKFGACKGVYVGKKHTWFRKHVRSVVFMFGLMGFLFLLDSLMVSIFDSMNLQGSSAPIKSSGLKEDKSYPNEEKSPVLMYDRLLNLASSALAEKEFKQDSLNFWEEPYRHASVWKPCADRKSSKIIGKSEKSNGFMLVSANGGLNQQRVAICNAVAVASLLNATLVLPKFLYSNVWKDPSQFGDIYQEDYFINIMKDELEIVKELPPHLESLDMEAIGSLITDADIPKEAKPIEYVQKVLPLLLRNGVVHFLGFGNRLGFDPLPFKLQRLRCKCNFHALKFVPKIQRVGSLLVQRIRKYDAAKSRLDKQLLGNFMSNIPLKENHAEGGPSKYLALHLRFEVDMVAYSLCEFGGGENEQKELQAYRETHFPLLIERLKNVKPVSPTQRRKLGKCPLTPEEAALVLSGLGFKRGTYIYLAGSHIYGGQSRMHPFTNLYPNLVTKEDLLSPGELEPFRNFSSQLAALDFIACATADVFAMTDSGSQLSSLVSGFRTYYGGGRAPTLRPNKKRLAAILMESRTIEWKSFEERVKKMIEEGQRVRVRGFGRSIYRQPRCPQCMCKSHLH

SEQ ID NO: 247 - DNA, 1236 bp, Vitis vinifera
atgggttttcaccacaacgcttctgatggagtctctcagcgagtcaatagcccacgcttctcaggtccaatgactcgccgagctcattcgtttaaacgcggcaacagcagcgggaacgctcataacaacggtagcagcaaggggggtggtgggttcgatccccactacgagattgatgtgcatctcaactcacctagatcggaaatatgtggtagccctgtttccggtgatgggtttgatgtagttttggaaaggaagcagacccatcatgtgaaccagagagttcatgggggtgttctgaagaatcagcccaagaagcatgttggatctgctgttcttgatttggggttgagggagaggaagaagttggggcattggatgttctttgtgttttgtggggtgtgcttgtttttgggtgttctgaagatttgtgccactgggtggtttggatctgccattgataggattgggtctcatcaggatttttctgaccccctcaacactcatctaaatgaaatggataaaagctctcatgattacgtatatagggagggaggaagtgatgttgaaagaactctgatgatggtagcatcaggtgtggtgaataggcagaaaagcatggctgaaaattcagatatctggtccaaacccaacagtgagaatttcacccaatgcgttaaccagccaagaattcacaaaaagctggatgcgaagacaaatggttacattatcattaatgctaatggtggattgaatcagatgagatttgggatatgtgatatggttgccattgcaaaggtcatgaaggcaacactggttcttccttcacttgatcacacatcctattgggctgatgacagtgactttaaggatctgtttgattggcaacacttcataaaggcactgaaagatgatgtccacatagttgagacattaccacctgattatgctggaattgaacctttcacaaagacaccaatatcatggtctaaggtcagttactacaaaacagagatcctcccactcttgaagcagtacaaggttatatattttactcatactgattccagacttgccaacaatggtattccaagttccatacagaaactgagatgtcgtgtaaattacaaagccttgaaatattcatccctaatagaagaacttggaaacaccttggtttcaagaatgcgagagggtggaaacccttatattgctctgcatttgaggcaagtatga

SEQ ID NO: 248 - protein, 411 aa, Vitis vinifera
MGFHHNASDGVSQRVNSPRFSGPMTRRAHSFKRGNSSGNAHNNGSSKGGGGFDPHYEIDVHLNSPRSEICGSPVSGDGFDVVLERKQTHHVNQRVHGGVLKNQPKKHVGSAVLDLGLRERKKLGHWMFFVFCGVCLFLGVLKICATGWFGSAIDRIGSHQDFSDPLNTHLNEMDKSSHDYVYREGGSDVERTLMMVASGVVNRQKSMAENSDIWSKPNSENFTQCVNQPRIHKKLDAKTNGYIIINANGGLNQMRFGICDMVAIAKVMKATLVLPSLDHTSYWADDSDFKDLFDWQHFIKALKDDVHIVETLPPDYAGIEPFTKTPISWSKVSYYKTEILPLLKQYKVIYFTHTDSRLANNGIPSSIQKLRCRVNYKALKYSSLIEELGNTLVSRMREGGNPYIALHLRQV

SEQ ID NO: 249 - DNA, 603 bp, Vitis vinifera
atgcgatatgaggtcagtcattggaaagagaaagagatcaatggtaccgagagaaggttgcttggtggctgtcccttgacccccagggagacttcccttttgctcaaagggctgggtttcccatctagcaccaggatttatttggtagctggtgaggcctatggtaaaggaagtatgcaatatctaatgaatgacttccccaacatcttctcccattcaacactttccactgaagaagagttgagccctttcaaggatcatcagaacagactggctggactggactatgttgttgcccttcaaagcgacgtgtttgtctatacctatgatggaaatatggcaaaggctgttcaaggtcacaggcgatttgagaacttcaagaagactattagccctgaaaagatgaattttgtaaaacttgttgatgaccttgatgaaggaaaaatcacttggaagaaattcagttccaaagtgaagaagcttcacaaagaccgagctggagcaccatacctacgagagcctggagagtttccaaagctggaggaaagtttctatgcgaacccacttccaggatgtatatgcgaaacaacaccgcaaaagtag

SEQ ID NO: 250 - protein, 200 aa, Vitis vinifera
MRYEVSHWKEKEINGTERRLLGGCPLTPRETSLLLKGLGFPSSTRIYLVAGEAYGKGSMQYLMNDFPNIFSHSTLSTEEELSPFKDHQNRLAGLDYVVALQSDVFVYTYDGNMAKAVQGHRRFENFKKTISPEKMNFVKLVDDLDEGKITWKKFSSKVKKLHKDRAGAPYLREPGEFPKLEESFYANPLPGCICETTPQK

SEQ ID NO: 251 - DNA, 1416 bp, Vitis vinifera
atgtatggcgagatttttcttggtcttttgaccaatgcttttatggatttttattgttgtgtggtgtttgcgtctcatttttcaggagatggcgatcctacttttcaatctgttcctgctactgatcatgatcagaatccagatgtttggactaagcccaacagtggggactactataaatgtattaatcgtccatttaatgaaaatagaagtgatgctgtcatgaatggctatattctaattcatgctaatggtgggttgaatcaaatgagaactgggataagtgacatggtagccatagcaaaaatcatgaatgcaaccctggtttatccttctcttgatcacaattccttctggacagattcaagtgattttaaagatatcttcaactggaaccactttcaagaggttctaaaagatgatattgaaatagtggagtctctcccaccagagtatgcagcagtgaagcccctccagaagcccccagtttcttggtccaaggctagttattacaaagagacgatagtttcattactgaagaagcacaaggtgatccagtttacacattccgattcccgccttgcaaacaattacctttccaagtcaatccaaaggctcaggtgccgggcaatgtatgatgcactccgtttcactgacacaatcgaaaatcttgcaatgaagttagtagacaggcttagaaccgataacaagccatatatagctctccatttaagatatgaaaaggacatgcttgcttttaccggttgcactcacaatctgactgcagaagatgctgaggagctcaaggttatgaggcataatgtcaagcattggaaggagaaagatatcgacggcgaggctaggcgactccaagggggctgccccataaccccaagagaggctgctgtctttcttgaggcaatggggttcccatccgatacacaaatatacatagttgcaggaaagatttatggcaaaaatggggtttctgcaatccagtccaagtacccaaatgtactctcacattctaacttagccacagaggaggagttggcgcttcttaagaaccgccagaatcagcttgctgccttggactatcttgtagcagttgagagcgatgtctttgtgtatacctatgatgggaatatggctaaggcagtgcagggccataggcggtttgaagggtttcggaagacgatcaaccctgacactcggaattttgtgagactgattgataaatgggacaacggtacgctgtcttgggagaagttttcgtccaaagtgaggttcttacatgcaaacaggactggagcgccataccataggatgcctggagagtcaccaaaacaagaggagaatttttacgcaaatcctttacctgggtgcatatgtaacaagcaagaaggcttattatag

SEQ ID NO: 252 - protein, 471 aa, Vitis vinifera
MYGEIFLGLLTNAFMDFYCCVVFASHFSGDGDPTFQSVPATDHDQNPDVWTKPNSGDYYKCINRPFNENRSDAVMNGYILIHANGGLNQMRTGISDMVAIAKIMNATLVYPSLDHNSFWTDSSDFKDIFNWNHFQEVLKDDIEIVESLPPEYAAVKPLQKPPVSWSKASYYKETIVSLLKKHKVIQFTHSDSRLANNYLSKSIQRLRCRAMYDALRFTDTIENLAMKLVDRLRTDNKPYIALHLRYEKDMLAFTGCTHNLTAEDAEELKVMRHNVKHWKEKDIDGEARRLQGGCPITPREAAVFLEAMGFPSDTQIYIVAGKIYGKNGVSAIQSKYPNVLSHSNLATEEELALLKNRQNQLAALDYLVAVESDVFVYTYDGNMAKAVQGHRRFEGFRKTINPDTRNFVRLIDKWDNGTLSWEKFSSKVRFLHANRTGAPYHRMPGESPKQEENFYANPLPGCICNKQEGLL

SEQ ID NO: 253 - DNA, 1611 bp, Vitis vinifera
atggctaaatcaaagaaagtctcttacatctctgtgccttcacaaataatcaactctctttcttcttcctcccttcagtctctgcttgtctcccccaagaagtcctccaggagctcaagcaagttcttttctttcttgttcaagaacccaaggctctggttccttgctttctttctttttggcttcatagccatgctgaaaatggggttcaatctcgagcctttgatccccttctcgccaaacccttgtggtattacccagtcccaggggatagtctctgctgggtcgttgagttctcatctgggtgttaaggaagatggggaaaagagtgagttctgggagcagcctgatgggttggggtacagaccgtgtttggagttcagcaaagagtataagaagacgagcctggagattgtggaggacaggaccaagtatttgatggtggtagtctcaggtgggatgaatcagcagaggaatcagatagttgacgccgttgtgattgccagaattctcggcgctgctctggttgttcccatcctgcaagtcaacgtcatttggggtgatgaaagtgaattttctgatatatttgatatggagcatttcaagagagttctggccaatgatgtgagaatagtttcatcattgccgtccacgcatctgatgtcaaggccggtagaggagaagagaacgccacttcatgtctctcctcaatggatccgtgcacggtacctcaaaaggcttaggagggaaggggttttgcttctacgtgggttggattcaaggctttctaaggatctcccttctgatcttcagaagcttcgatgcaaggtggcttttcatgcattgaggttctcgcagccaattttggaactcggtaacaaaatggcagagaggatgaggagcaaaggaccttaccttgcccttcatctacgaatggaaaaggatgtatgggtgagaacaggttgtcttcctggtttgagctctcagtatgatgagataataaacaatgagaggaaactaagacccgagctcctaactgctagatcaaacatgacttaccatgaaagaaagcttgcaggcctctgccccttaaacgccttggaggttacaaggctgcttaaagctcttggagctccaaaaagtgcaaggatatactgggctggagggcaaccattcggtggggaagaagctttgctgccattaacccgagagtttcctaatttctacaataaggaggaccttgccttgcctggtgaactagagccattttcaaagaaagcctccttcatggctgccattgactatattgtttgtgagaagagtgatgttttcataccgtctcatgggggaaacatgggccatgcaattcagggacatcgggcttatgcaggtcacaagaagtatattaccccgaataaaagacagatgattccttactttctgaactctcctctccctgaagcagagttcaacagggttataatggaactgcaccgcgattccttcggtcagccagagctcagggctaccaaagctggaagggatgttacaaagtaccctgtccctgagtgcatgtgtaatagtacttcaagcacacattccatgttatga

SEQ ID NO: 254 - protein, 536 aa, Vitis vinifera
MAKSKKVSYISVPSQIINSLSSSSLQSLLVSPKKSSRSSSKFFSFLFKNPRLWFLAFFLFGFIAMLKMGFNLEPLIPFSPNPCGITQSQGIVSAGSLSSHLGVKEDGEKSEFWEQPDGLGYRPCLEFSKEYKKTSLEIVEDRTKYLMVVVSGGMNQQRNQIVDAVVIARILGAALVVPILQVNVIWGDESEFSDIFDMEHFKRVLANDVRIVSSLPSTHLMSRPVEEKRTPLHVSPQWIRARYLKRLRREGVLLLRGLDSRLSKDLPSDLQKLRCKVAFHALRFSQPILELGNKMAERMRSKGPYLALHLRMEKDVWVRTGCLPGLSSQYDEIINNERKLRPELLTARSNMTYHERKLAGLCPLNALEVTRLLKALGAPKSARIYWAGGQPFGGEEALLPLTREFPNFYNKEDLALPGELEPFSKKASFMAAIDYIVCEKSDVFIPSHGGNMGHAIQGHRAYAGHKKYITPNKRQMIPYFLNSPLPEAEFNRVIMELHRDSFGQPELRATKAGRDVTKYPVPECMCNSTSSTHSML

SEQ ID NO: 255 - DNA, 2046 bp, Vitis vinifera
atgaaaggcgaatcaaagatggttttcaagtcaaagatgaagtgggttggccttgttggccttgtgctctctgctttctctatattcatccatttgctccttgctagatacaccgaggatggcatttctgactaccagtcttccgtcactatcttctcttggcgacccatttttgagaatgcagatcttcccagaactagtccattgcatcgaaaattctggggtccggtaaggcgttttgaacctttaaatccagatgcaaatcccagaggatactatgctgctccccctttgcagacaaatggctatatttttgtcaggatacaagggggatttcatgagatcaggaattcgatctcagatgttgttgtggtttctcggcttctaaatgctactctagtgattcctgaaattcaatcaaccacaagtagcaagggaatcagttctgagttcaagagttttgcatatctatataacgaggatcaattcatgatagcattagcaaaagatgtgaaaattgtgaaaacccttccaaagaatctcaaagaagcaaggagaaagaaggagatacccatgttcagggtgcctcactcagcatctccctatttttatctgcgcaatgttctaccggtgctaaacaagcactcagttgttgaactagtagtttctgatggtggatgcttgcaggctgtcctcccacccaaccttgaagagtatcagaggctaagatgtagagttgctttccatgctctacgattccgacaggaggtccaggaacttgcaactagaattttaaataggttacgggctcctggacgtccatttatagcctttgaccctgggatgaccagagatgctttagcatatcatgggtgtgccgaactcttccaggatgtccatactgaacttattcagcacaaaagatcatggatgataaaacgtgggattgtcaaagggaagctttctgtagattcggcaaagcaacgacttaatggttcttgtccactcatgccagaggaggttggtattcttcttcgtgcttatggatactcatcagacacaatcatatatgtttctgggggagaagtttttggtggacaacggacattaattcctctacacgggatgtttgagaatgttgttgacagaacctccctaagcactggttgggagctcaatagaatatatggtcttgaggttaaaattgccaccaatactcctaggatcccaacttttgttcaggaagaaatgaaacttgaagcatggaaaaattctggtccacgtcctcgcccacttccaccacctccagccaggcctaaatatccatacaacattgaaggttggtggggttgggtagctgagagtgataatgagcctgatcgtactgtcatggaattgaggactaatgctcataaattactatgggaagcaattgactatgtgatatgtgttgaagctgatgtgttcattcctggatttgatcgtgatggcaaaggacatcctaattttgcaagcttagtgatggggcaccggctctatcagtcagctgcatccataacatacaggcctgacagaaaagaagttgccaagcttttacaagaaacacgtgaccacctataccaagcaaatcggacatggctaacatcagtgcgcatgcatctgagaaaaagcttatttgatgggctaacagaagcatctgcaaagtcaaagctactatcttttctttcacatccagttcctgaatgttcttgcttgaggtccaaccttaacgaaataccatttcctggtttgagtcctccatctcaagctcaagctcaggctgctcttggagctgtgcatcgttgccccgcttggatagaaaatgctttaatcccgcggcaaagagacaaggacaatgatgaggatattgatgaggatgattccacatcatctggactgttctttcggcctagaggtggaaatcatgaagttggaggtggagaaataaacaacaaagaagaagctcaattagaggaccaagaagaacttgagggtgcagaaagatga

SEQ ID NO: 256 - protein, 681 aa, Vitis vinifera
MKGESKMVFKSKMKWVGLVGLVLSAFSIFIHLLLARYTEDGISDYQSSVTIFSWRPIFENADLPRTSPLHRKFWGPVRRFEPLNPDANPRGYYAAPPLQTNGYIFVRIQGGFHEIRNSISDVVVVSRLLNATLVIPEIQSTTSSKGISSEFKSFAYLYNEDQFMIALAKDVKIVKTLPKNLKEARRKKEIPMFRVPHSASPYFYLRNVLPVLNKHSVVELVVSDGGCLQAVLPPNLEEYQRLRCRVAFHALRFRQEVQELATRILNRLRAPGRPFIAFDPGMTRDALAYHGCAELFQDVHTELIQHKRSWMIKRGIVKGKLSVDSAKQRLNGSCPLMPEEVGILLRAYGYSSDTIIYVSGGEVFGGQRTLIPLHGMFENVVDRTSLSTGWELNRIYGLEVKIATNTPRIPTFVQEEMKLEAWKNSGPRPRPLPPPPARPKYPYNIEGWWGWVAESDNEPDRTVMELRTNAHKLLWEAIDYVICVEADVFIPGFDRDGKGHPNFASLVMGHRLYQSAASITYRPDRKEVAKLLQETRDHLYQANRTWLTSVRMHLRKSLFDGLTEASAKSKLLSFLSHPVPECSCLRSNLNEIPFPGLSPPSQAQAQAALGAVHRCPAWIENALIPRQRDKDNDEDIDEDDSTSSGLFFRPRGGNHEVGGGEINNKEEAQLEDQEELEGAER

SEQ ID NO: 257 - DNA, 1491 bp, Vitis vinifera
atgtgcagagtggaggagctggagtgggaaatgggggccaaaagtagagtggagaagttgaagaatgtgatggtgtgtaggtcgagaatgaaggtgtggatgatgagggggatgaccagtgtgttggtctggacttgtgttgtgcagttgatggcattggaggagacttggggacccaggttgttgaagggctggccttcttgtttctctcactccgatttgtcttcgtctctgcaattgtctccggctccgcccaagcttgttcttccaccaaaaagggtttataagaataatggctatcttatgatttcttgcaatggaggtctgaaccaaatgcgagcagcaatctgtgatatggttgctattgccagatttttgaatgtcactctaattgttccagagttggataaagcctccttttgggctgatccaagtgagttccaagacatttttgacattgatcacttcatcgcatcattgagagacgaagttcggatattgaaagagctaccacccaggctgaagacaagagttgagttgggaatgttttattcattgccacctgttagttggtctaacatttcctactacctgcatcagattcttcctctggtgcaaaagcacaaagttgtacatttgaataaaaccgatgctcgtcttgctaataatgggctgccattagagattcagaagttgcgctgccgagtaaattttaatgctctgagattcacttcccagatagaggaattgggcagaagggttgtcaggattctgagggaaaagggccctttcctggttcttcatctcagatatgaaatggacatgttggctttctctggctgtactcatggttgcaatgataaggaggcagaagaattaacaagaatgagatatgcttacccctggtggaaggaaaaaataatagattccaaagtgaaaagaagagaaggcctgtgccctttgacacctgaggaaactggtctaatattgagtgcactgggtatcgatcgtaatgttcaaatttatattgctgctggacaaatatatggtggagaaagaagaatggcaactttggcaacagcttttcctaatttggttcgaaaggagacacttttggaaccctcagacttaaggtttttccagaaccacacatcccagatggcagcattggattatcttgtctccctggagagtgatatttttgttccaacgtatgatggaaacatggctaaagttgttgaaggccaccgcagattcttaggcttcaagaagaccatccaattggacagaaggcttctcgtcaatttagtagatgaatacaagaatgggtcattgagctgggatgagttctcctctactgttaaggaagctcatgcataccgcgtggggagccccagcagacgggttgtgatcccagatagaccaaaggaagaagattatttctattccaatccgcacgagtgtttgcaactgttagatgaaccattatga

SEQ ID NO: 258 - protein, 496 aa, Vitis vinifera
MCRVEELEWEMGAKSRVEKLKNVMVCRSRMKVWMMRGMTSVLVWTCVVQLMALEETWGPRLLKGWPSCFSHSDLSSSLQLSPAPPKLVLPPKRVYKNNGYLMISCNGGLNQMRAAICDMVAIARFLNVTLIVPELDKASFWADPSEFQDIFDIDHFIASLRDEVRILKELPPRLKTRVELGMFYSLPPVSWSNISYYLHQILPLVQKHKVVHLNKTDARLANNGLPLEIQKLRCRVNFNALRFTSQIEELGRRVVRILREKGPFLVLHLRYEMDMLAFSGCTHGCNDKEAEELTRMRYAYPWWKEKIIDSKVKRREGLCPLTPEETGLILSALGIDRNVQIYIAAGQIYGGERRMATLATAFPNLVRKETLLEPSDLRFFQNHTSQMAALDYLVSLESDIFVPTYDGNMAKVVEGHRRFLGFKKTIQLDRRLLVNLVDEYKNGSLSWDEFSSTVKEAHAYRVGSPSRRVVIPDRPKEEDYFYSNPHECLQLLDEPL

SEQ ID NO: 259 - DNA, 1689 bp, Vitis vinifera
atggctaggcacagaaacatcaagaacagcttcatcactgtaatcccatctccactcttcaccctatttcgtgtctctccacttacttcacttctcaacaaaaccccaagaagccacaggtcgtgttcttcattcccaccaagaagctcttttttcatgatcttccttctcattctcgtctctttcttgggactttctctgctcaggttggtgttcgtttctcagaacctagtgccatgtccatgtccattaacctctttccccactctgttgcctcctccaaactctcatctatctttggcctcactttctactaagaatcaagagccagtagtgctgtcaaggagtgcaacagtgcccttaccagctcatgcggtttccaggaacatgacaaaggaggaggcagagttctgggcacagcctgatggagaagggtacaggccttgtttggatttcagtatactgtaccggaaagcatctgctaagatatcaaaggagaagcacaggttcttggtggtggtagtctcaggaggattgaatcaacagaagaatcagattgttgatgcagtcgttattgcgagaattcttgaagcagccctggttgtgccggttcttgagattaatcagatttggaaagatgaaagtgaattttctgatattttcgatgtggatcatttcaagaggaccttacaagctgatgttcgagttgtatcatctcttccctccacgcatttgagttcaaaaccaacaattaacacacgaatgcccctcaatgtttcgcccctttggatccgtactaaattcctcacagaactgaacaaagaaggtgttctcatactaaaagggatagattctaagctctccaagaatcttccacttgatcttcagaagcttcggtgtaaggtagctttccatgcactaagatttgcagctccaattcaggagcttggcgataggtttgcaagaagaatgtggattgaggggccatatatcgctctccatctccgtctcgagaaggatgtgtgggtgagaactggatgtcttactggtttaggccccgagtatgatgatattattaggaagattcgtgagtctcgacctagactcctcactggaaggttgaacatgacctacactcagcgaagacttgctggactttgtcctctaaatgccttagaagtagcaaggctgcttaaggctctaggggctccgaggactgcacgagtgtacagggcaggaggagagccatttgggggagccaaggcgctgcaggcccttatgggggagtttccaaatgtggtaacaaaggaaatgctggcacgagaaggcgagctctcaccatacgtcaacagaccatctgctatggctgctctggactacattgtatcgctgagcagtgacgtgttcctaccttcccatggaggcaacatggggcgagccatgcagggtcatcgcgcatacgttgggcataggaaatttgtaaagccagacaagcgagaaatgattgctttcttcgaagacgcctccatttctgaggcagagttcagaagcatcatgaggaagctgcacagcagatatcagggccagcctgagaaaaggacaaacaagagaagtacccgggatgtgattgcttacccagtgcctgaatgcatgtgcagacacagcaacaggcctctcctaagaagctaa

SEQ ID NO: 260 - protein, 562 aa, Vitis vinifera
MARHRNIKNSFITVIPSPLFTLFRVSPLTSLLNKTPRSHRSCSSFPPRSSFFMIFLLILVSFLGLSLLRLVFVSQNLVPCPCPLTSFPTLLPPPNSHLSLASLSTKNQEPVVLSRSATVPLPAHAVSRNMTKEEAEFWAQPDGEGYRPCLDFSILYRKASAKISKEKHRFLVVVVSGGLNQQKNQIVDAVVIARILEAALVVPVLEINQIWKDESEFSDIFDVDHFKRTLQADVRVVSSLPSTHLSSKPTINTRMPLNVSPLWIRTKFLTELNKEGVLILKGIDSKLSKNLPLDLQKLRCKVAFHALRFAAPIQELGDRFARRMWIEGPYIALHLRLEKDVWVRTGCLTGLGPEYDDIIRKIRESRPRLLTGRLNMTYTQRRLAGLCPLNALEVARLLKALGAPRTARVYRAGGEPFGGAKALQALMGEFPNVVTKEMLAREGELSPYVNRPSAMAALDYIVSLSSDVFLPSHGGNMGRAMQGHRAYVGHRKFVKPDKREMIAFFEDASISEAEFRSIMRKLHSRYQGQPEKRTNKRSTRDVIAYPVPECMCRHSNRPLLRS

SEQ ID NO: 261 - protein, 13 aa, Artificial sequence
  motif 1
HYIALHLRYEKDM

SEQ ID NO: 262 - protein, 15 aa, Artificial sequence
  motif 2
IYIVAGEIYGGHSMD

SEQ ID NO: 263 - protein, 28 aa, Artificial sequence
  motif 3
ALDYNVAVQSDVFVYTYDGNMAKAVQGH

SEQ ID NO: 264 - DNA, 2194 bp, Oryza sativa
aatccgaaaagtttctgcaccgttttcaccccctaactaacaatatagggaacgtgtgctaaatataaaatgagaccttatatatgtagcgctgataactagaactatgcaagaaaaactcatccacctactttagtggcaatcgggctaaataaaaaagagtcgctacactagtttcgttttccttagtaattaagtgggaaaatgaaatcattattgcttagaatatacgttcacatctctgtcatgaagttaaattattcgaggtagccataattgtcatcaaactcttcttgaataaaaaaatctttctagctgaactcaatgggtaaagagagagattttttttaaaaaaatagaatgaagatattctgaacgtattggcaaagatttaaacatataattatataattttatagtttgtgcattcgtcatatcgcacatcattaaggacatgtcttactccatcccaatttttatttagtaattaaagacaattgacttatttttattatttatcttttttcgattagatgcaaggtacttacgcacacactttgtgctcatgtgcatgtgtgagtgcacctcctcaatacacgttcaactagcaacacatctctaatatcactcgcctatttaatacatttaggtagcaatatctgaattcaagcactccaccatcaccagaccacttttaataatatctaaaatacaaaaaataattttacagaatagcatgaaaagtatgaaacgaactatttaggtttttcacatacaaaaaaaaaaagaattttgctcgtgcgcgagcgccaatctcccatattgggcacacaggcaacaacagagtggctgcccacagaacaacccacaaaaaacgatgatctaacggaggacagcaagtccgcaacaaccttttaacagcaggctttgcggccaggagagaggaggagaggcaaagaaaaccaagcatcctccttctcccatctataaattcctccccccttttcccctctctatataggaggcatccaagccaagaagagggagagcaccaaggacacgcgactagcagaagccgagcgaccgccttctcgatccatatcttccggtcgagttcttggtcgatctcttccctcctccacctcctcctcacagggtatgtgcctcccttcggttgttcttggatttattgttctaggttgtgtagtacgggcgttgatgttaggaaaggggatctgtatctgtgatgattcctgttcttggatttgggatagaggggttcttgatgttgcatgttatcggttcggtttgattagtagtatggttttcaatcgtctggagagctctatggaaatgaaatggtttagggatcggaatcttgcgattttgtgagtaccttttgtttgaggtaaaatcagagcaccggtgattttgcttggtgtaataaagtacggttgtttggtcctcgattctggtagtgatgcttctcgatttgacgaagctatcctttgtttattccctattgaacaaaaataatccaactttgaagacggtcccgttgatgagattgaatgattgattcttaagcctgtccaaaatttcgcagctggcttgtttagatacagtagtccccatcacgaaattcatggaaacagttataatcctcaggaacaggggattccctgttcttccgatttgctttagtcccagaattttttttcccaaatatcttaaaaagtcactttctggttcagttcaatgaattgattgctacaaataatgcttttatagcgttatcctagctgtagttcagttaataggtaatacccctatagtttagtcaggagaagaacttatccgatttctgatctccatttttaattatatgaaatgaactgtagcataagcagtattcatttggattattttttttattagctctcaccccttcattattctgagctgaaagtctggcatgaactgtcctcaattttgttttcaaattcacatcgattatctatgcattatcctcttgtatctacctgtagaagtttctttttggttattccttgactgcttgattacagaaagaaatttatgaagctgtaatcgggatagttatactgcttgttcttatgattcatttcctttgtgcagttcttggtgtagcttgccactttcaccagcaaagttc

SEQ ID NO: 265 - DNA, 56 bp, Artificial sequence
  primer: prm14038
ggggacaagtttgtacaaaaaagcaggcttaaacaatggaccaatcactcaagtgg

SEQ ID NO: 266 - DNA, 51 bp, Artificial sequence
  primer: prm14039
ggggaccactttgtacaagaaagctgggttcctcttcataacaaatcagcg

SEQ ID NO: 267 - DNA, 1050 bp, Arabidopsis thaliana
atggctcgtccacaagaccctccacgtggtttcttcccttttggaaaccccttcaaaaatctatcttcgaagaactcggtactctcctcaaagcttctcccactcctgaacaattttgagaccaacttagcatcttctattagtaagcttgtccctaaggaaaagagcgatatcctgactgtctcatggatgaaacaagctatggaatctctttgcgagacacataatggtatcaagacccttataaccgatcttgagcttcctgtatcagattgggaggataaatgggttgatgtctatcttgacattagtgtgaagcttcttgatctctgcaatgcctttagctctgagcttacccgtctcaaccaaggtcatctcttactccagtttgctctgcataacttggaggccaactctcctcagaatctgtcgaaagctcagtcatcactagacagttggaagcaacacattgtctccaagaacccgagaatagaaaattgccgtgcaatcttgagcagccttgttcagaccttgaatctccccaaggtgaaaaactcggccaaagggaaagtcttgatgagagctctatatggtgtaaaggttaagaccttatacatctctggtgtttttgctgcagcgttctcaggttcatcgcagaatctgatgtaccttacagtctcaaacgagcttccatgggcacaatcattcatggaagtgcagaacaccatgaacgcagaaatcaagaacatatttttgtcagacgggttaacggttctgaaagagctagaggcagttgcttcaggtgtcaagaaactctaccctgcgatccaacaaggatcaatagatcccatatcgctgcagccactgaaggactcggtcacagaattatcgaatgggatagatcttgtttcgaaagaagtggattgtttcttcaagattctgttatcggggagagacacattactagagaacctaaggtcgatgggtgcatcaaccctacaggcaacatcgccaaaaaaggctgccggaaaaaattacagaggattctga

SEQ ID NO: 268 - protein, 349 aa, Arabidopsis thaliana
MARPQDPPRGFFPFGNPFKNLSSKNSVLSSKLLPLLNNFETNLASSISKLVPKEKSDILTVSWMKQAMESLCETHNGIKTLITDLELPVSDWEDKWVDVYLDISVKLLDLCNAFSSELTRLNQGHLLLQFALHNLEANSPQNLSKAQSSLDSWKQHIVSKNPRIENCRAILSSLVQTLNLPKVKNSAKGKVLMRALYGVKVKTLYISGVFAAAFSGSSQNLMYLTVSNELPWAQSFMEVQNTMNAEIKNIFLSDGLTVLKELEAVASGVKKLYPAIQQGSIDPISLQPLKDSVTELSNGIDLVSKEVDCFFKILLSGRDTLLENLRSMGASTLQATSPKKAAGKNYRGF

SEQ ID NO: 269 - DNA, 1041 bp, Brassica napus
atgagcagagcacaagatccaccgagaggtttcttcccatttgggaacccctttcgtatgctatcccccaagggctcacctttatctccctggctactctctctattgaacaacttcgagttacttttagcagagaggctcaagaaactcatgcctaagtccaaatccgacatcctcaccttatcctggatgaagctagccatggagtcactctgcgagactcacaccaacatcaacaccctcatcaccgacctccagcttcctgtctccgactgggaagagaaatgggtcgacgtctacctcgacgtaagcgtcaagctgctagatctctgcaacgcgtttagctcggagctcacgcgtcttaaccaaggagatctctaccttaagtgcgtgcttcacagcttgcagtctggttctggcgagaagaagtatctccaggctcggtcttcgcttgatagttggaggcagcatgtgaatgcaaacaacgctaggattgaaaattgccgtgcggttcttgactctttggttaagtctctgagcttgcctaaggtcaagaactcggataaagggaaggttcttatgagggccttttacggtgtgaaggttcaaacggtttatatctgcagcgtgttcaccgcggcctggtctgactccaccaacgatcttttcgacttaccggtctctgagaagccgttgtgggctaaggtctttgctgatgtgcagagcgttgtgaacggtgagatcagagagatgttgtcttccggtagaagtacgattctcaaggagctggagagcgttgatgctagtgtggagaagctgtatccgatggttcaagatggtgttggtactgtggaagctgagtcttttaaggagtgtgtaatggagttgggggtacaagctgagaaactgtctcaagggttagatcagttactagaggaagttgatagtttctttaaaatgactttaagtggaagagatgtgttgctttgtaatcttaggtctagtgactcattctctggcaatgcaattggagagatttag

SEQ ID NO: 270 - protein, 346 aa, Brassica napus
MSRAQDPPRGFFPFGNPFRMLSPKGSPLSPWLLSLLNNFELLLAERLKKLMPKSKSDILTLSWMKLAMESLCETHTNINTLITDLQLPVSDWEEKWVDVYLDVSVKLLDLCNAFSSELTRLNQGDLYLKCVLHSLQSGSGEKKYLQARSSLDSWRQHVNANNARIENCRAVLDSLVKSLSLPKVKNSDKGKVLMRAFYGVKVQTVYICSVFTAAWSDSTNDLFDLPVSEKPLWAKVFADVQSVVNGEIREMLSSGRSTILKELESVDASVEKLYPMVQDGVGTVEAESFKECVMELGVQAEKLSQGLDQLLEEVDSFFKMTLSGRDVLLCNLRSSDSFSGNAIGEI

SEQ ID NO: 271 - DNA, 1131 bp, Picea sitchensis
atgagtcgcccgcatgatggtcattcgatgtcctcgttctttggaaatcattttagaatttttatccgtaagcgatcattcaattcctctgtaaggcttaatcagatattgaaaggttttgagactgttttagaagaaagattagagcggctcaagctgaataagccaaaggattttatagatctgacatggatgcgacaagccatggaaatcttgttctcactgcacagtgatctgagatccttagttggggatctcgggtttcctatagctaaatgggataaaaaatggattgatcaatatctggatgacactgtaaatctgcttgatatttgtattgcattgaatgctgaaatctcatgcctcgatcatcgccatcttatagtccagtatgtactgcatttgctgaatttctctgatggaatgctatcatctgacaagttaattcgtgccaacgatcatctgggagaattgatgggagaaacaaaagccaaggagaaaaatggtgtatcccaaaccaaaaggaaaattgagaattgtgctgccatattagagggtatgcgtaaaagtcttcacctaagaaaggtgaaatcctcggccaagggcaaagttttattgagggctatatatggggtgaaggcaacaactatatttatttgcagtattcttgtatctgtctttgcgggttcttctggtccattggtggacttgagcattcctgatcagttttcgtggtcagctttatttatgacgttgcaacaagaagtgaatgaagaaatcagggttgggttcgtcatgggccgtgttacagctctgaaagagttggagagcttgaatgcagcagttaaaaatcttcgctcaacgattcagatgttatccctagacatgccaggaggaaacgaaggggggtttcagatcacagagggatcagagcaagcagaacaaataagacagccagttcaagaattacagcaaagtgcagatttgctttcccaaggtttagatcctctcacaaaacaggtcaatgaatttttccagattattctcaaaggaagaaatgctttgcttgatagcctcagattttctgaagataacgacacgcaaattggagatgaactctttaaaaagtga

SEQ ID NO: 272 - protein, 376 aa, Picea sitchensis
MSRPHDGHSMSSFFGNHFRIFIRKRSFNSSVRLNQILKGFETVLEERLERLKLNKPKDFIDLTWMRQAMEILFSLHSDLRSLVGDLGFPIAKWDKKWIDQYLDDTVNLLDICIALNAEISCLDHRHLIVQYVLHLLNFSDGMLSSDKLIRANDHLGELMGETKAKEKNGVSQTKRKIENCAAILEGMRKSLHLRKVKSSAKGKVLLRAIYGVKATTIFICSILVSVFAGSSGPLVDLSIPDQFSWSALFMTLQQEVNEEIRVGFVMGRVTALKELESLNAAVKNLRSTIQMLSLDMPGGNEGGFQITEGSEQAEQIRQPVQELQQSADLLSQGLDPLTKQVNEFFQIILKGRNALLDSLRFSEDNDTQIGDELFKK

SEQ ID NO: 273 - DNA, 1032 bp, Cichorium endivia
atgagccgttcaaatggaccacaccgaccatttctcccaattgggaatccattcaagatgatgatgcccaaaacctctcatctgccatcaacattccttacaacattcgagaaaaatctagccaaaagatttcaacaattaaaaccaaatcatccaaacgacatcatcacctttccatggatgaaatccgcgctagcttcaatatgtgaaacacttgacgacataaaaaaactcattgtagatttacagctcccaatatgcagttgggacatcaaatgggtcgatatgtatttagacaacagtttaaacttactcgatttttgcagtgcttatggaaccgatattgtgaggcaaagattcggttacgtgatgataaaatgcgcattacttgatctcgaatcagacaacccacaaaaactaatgcaggcatcttcttctcttcacgaatggagacagtatcaaaactgttatgacaactcaaagctacaagattgttgtgatgttatatccaagcttgaagaaacacttaatttgcctaaaatcaagaacataccaaaagctaaggatttggttcgagccatgtatggactcaaggttcaaaccatgttcatatttagcacattcgtggctgcattttcgaatttccctagggttcttgttgagttacaggttcctaaattgtacttatggcaagaatcttttacagatttgcagacagtcatgaatggtgaaatcaagaatgtatatagttcaggtgggatttctccattgatagagcttcgaagaattgaggaaaatgtcaagaaattgtacccgttgattcatgatggtttgggtgatgttaaacaggaggattttaagagttattgttccgaattgatggaaaataatgagaagtttttggttgggttagatgagattaaattagaaatggatcggttttttaaagttgtggtgggcgggcgaatggctttgttggataattttcaacagcaaccgccaaggtgcggggtgcaacaagtaagaatgtga

SEQ ID NO: 274 - protein, 343 aa, Cichorium endivia
MSRSNGPHRPFLPIGNPFKMMMPKTSHLPSTFLTTFEKNLAKRFQQLKPNHPNDIITFPWMKSALASICETLDDIKKLIVDLQLPICSWDIKWVDMYLDNSLNLLDFCSAYGTDIVRQRFGYVMIKCALLDLESDNPQKLMQASSSLHEWRQYQNCYDNSKLQDCCDVISKLEETLNLPKIKNIPKAKDLVRAMYGLKVQTMFIFSTFVAAFSNFPRVLVELQVPKLYLWQESFTDLQTVMNGEIKNVYSSGGISPLIELRRIEENVKKLYPLIHDGLGDVKQEDFKSYCSELMENNEKFLVGLDEIKLEMDRFFKVVVGGRMALLDNFQQQPPRCGVQQVRM

SEQ ID NO: 275 - DNA, 1044 bp, Arabidopsis thaliana
atgagccgaccacaagatccaccccgaggtttcttcccatttggaaatccctttcggatgttatcatcaaagggatcagatttatcgccatggctactttctctattgaacggctttgagctacgtttggaagagagactgaagaaacttatgcctaagaacaaagatgacatcctcactttatcctggatgaagctagctatggagtcactctgcgagactcataagaacattaacactctcattactgatctccagcttcctgtctctgattgggaagagaaatgggttgatgtttacctcaacataagcgttaggttactagatctctgtaatgcctttagctctgagctcacacgtctcaaccagggagatctcttcctcaagtgtgttctgcacaatttacaatcggattctggggagaagtatctccaggctcgatcttcgcttgatagctggaggcaacatgttaatacaaacaaccctagaattgaaaactgccgtgcggttctagacagtcttgttaaatctctgagtctgcctaaagtcaagaactcgcctaaaggaaaggttctgatgcgagctttttatggtgtgaaggttcaaacagtttatatctgcagtgtatttaccgcagcctggtctgattccaccaaggatcttttcgatttacctgtctctgaaaaaccattatgggcaaaggtctttactgatatgcagagtgttgtaaatgctgagatcagagacatgttgtcttccggtagaaccacgattctcaaagagctggagagcgttgatgctagtgtcgagaagctatacccgatgatccaagatggcgttgatcctgtcgaagttgaattcttcaaagataatgttatggaattggggacacaagctgagaaattgtctcaagggttggatcagttactggaggaagttgatagtttctttaaactgactttgagagggcgcgatgtgttgctctgtaatcttaggtcaagtgactcaatctctggcaatgcagttggagaagatgtagactaa

SEQ ID NO: 276 - protein, 347 aa, Arabidopsis thaliana
MSRPQDPPRGFFPFGNPFRMLSSKGSDLSPWLLSLLNGFELRLEERLKKLMPKNKDDILTLSWMKLAMESLCETHKNINTLITDLQLPVSDWEEKWVDVYLNISVRLLDLCNAFSSELTRLNQGDLFLKCVLHNLQSDSGEKYLQARSSLDSWRQHVNTNNPRIENCRAVLDSLVKSLSLPKVKNSPKGKVLMRAFYGVKVQTVYICSVFTAAWSDSTKDLFDLPVSEKPLWAKVFTDMQSVVNAEIRDMLSSGRTTILKELESVDASVEKLYPMIQDGVDPVEVEFFKDNVMELGTQAEKLSQGLDQLLEEVDSFFKLTLRGRDVLLCNLRSSDSISGNAVGEDVD

SEQ ID NO: 277 - DNA, 963 bp, Arabidopsis thaliana
atgttgtttccaaagaaaaatttattattgaacaactttgagtcatcattaaccgagagattgaagaaactcatacctcaaaatacagatgagattctcaccttaccttggatgattctagctatggaattactttatgatacacataatgatataaacattctcatcactgatctcaagcttcattatatgactgattcggagcatggatattggtttgagaattacatgaacataaatacaaaattgctcgatctgtgtaacgcttttatgtccttgcttcgtcacatgaaccatggcattgtttgcttaaagttccttaggcataaattagaaatgaaatctgaggatctatgcactgagatttgttccgcacttgatagttggagggaaaatatcaccgcggaaatatcgaaatgccgcgaagttcttgggagatatgttgaatcattaaactttcataaagtcaagaattgtataaaagaagcaaaggttcttatgaaggcgttttatggggctaatgttcttacggcttatatctgcagtgtctttgtgatagttttgtcgaattccgacaaagatattttgcctatatatgtctggaagcaatcattgtggaaaaaagatttcttggatttgcagactatcgtaaacgtcaaaacaagagttaatatttccactgatggaacaatggtactccaagagttagaatctgttgctgccaaaatgaagaagatgtatcttacaattcaagaaggtgatgatcttgttcaagagtcctttaaggaatctattgaggaatgcaaagaagaagtcgagaaactggaacatgggttagatgaaatcttcaggaaaattggcaacttgtctgatgtaacctttaaaggacgtgaaatcattcgtgacggtttatttgattcaatgattagggagttaactcatggaccatacatatatgattaa

SEQ ID NO: 278 - protein, 320 aa, Arabidopsis thaliana
MLFPKKNLLLNNFESSLTERLKKLIPQNTDEILTLPWMILAMELLYDTHNDINILITDLKLHYMTDSEHGYWFENYMNINTKLLDLCNAFMSLLRHMNHGIVCLKFLRHKLEMKSEDLCTEICSALDSWRENITAEISKCREVLGRYVESLNFHKVKNCIKEAKVLMKAFYGANVLTAYICSVFVIVLSNSDKDILPIYVWKQSLWKKDFLDLQTIVNVKTRVNISTDGTMVLQELESVAAKMKKMYLTIQEGDDLVQESFKESIEECKEEVEKLEHGLDEIFRKIGNLSDVTFKGREIIRDGLFDSMIRELTHGPYIYD

SEQ ID NO: 279 - DNA, 1047 bp, Arabidopsis thaliana
atgagccaacaacgtacacgctctcggaacccgttcaagattctgtttacgaagaagaacaatgctcgattatcgccaaagcttctctcactgttgaacaatttcgagactaacttgacggtatcgattagagaacttgtaccaaaggataagaatgatatcgttagtgtttcttggatgatacaagccatgcagtctctttgtgagacacacaagagtatcaggacgctcgtgaaggatttagaggttccagtatcggatttggaggagaatttcatttatatcttctctgactttagcttgaagcgggaactctgcaacgcctttacctcagagatatatcatttggaacatggcaatctattactaaagtttgcttttagtaagctggagacaaacagtggcaatattcttcagcgttggaatcagcacatggtttccaagaacccgagtatcgaaaactggggcgcggttttgagtaggctggttgaatcgatggatcatcatcatcatatctccaagaaggggaagaagaaatactctgcggaaggaaaagttctcttacgagttttatacggtgtaaaggtcaagactttatacatattcagcgtgtttgatgcatcgttctcgggttcttccaagaatctcttctatctaaccattccaaaggagatggaggagcttccatgggttcaagctttcatggaactgcagaacactattaacccggagatcaaaaacacatttttatcagacggattcacggttataaaagatctcgaggctgttgaaaccggtgtgaagaagctttacacagcggtacaagaagggtcggttcctattttgttagtggaaccattggagaagtcagtgatagaactttcggaaaggtttgagctagtctccaaggaaacacgttgcttgtcgaagatggtgatctctgcccgagacgcattgttggagagcctgtggacgaaatgcgcagaagagctaggagtgacattgccaacgatggttaaaagtgttaatatagaggaaaagagctaa

SEQ ID NO: 280 - protein, 348 aa, Arabidopsis thaliana
MSQQRTRSRNPFKILFTKKNNARLSPKLLSLLNNFETNLTVSIRELVPKDKNDIVSVSWMIQAMQSLCETHKSIRTLVKDLEVPVSDLEENFIYIFSDFSLKRELCNAFTSEIYHLEHGNLLLKFAFSKLETNSGNILQRWNQHMVSKNPSIENWGAVLSRLVESMDHHHHISKKGKKKYSAEGKVLLRVLYGVKVKTLYIFSVFDASFSGSSKNLFYLTIPKEMEELPWVQAFMELQNTINPEIKNTFLSDGFTVIKDLEAVETGVKKLYTAVQEGSVPILLVEPLEKSVIELSERFELVSKETRCLSKMVISARDALLESLWTKCAEELGVTLPTMVKSVNIEEKS

SEQ ID NO: 281 - DNA, 1035 bp, Brassica napus
atggctcgtccacaagaccctccacgcggtttcttcccttttggaaaccctttcaagaacctatcctccaagaacccagtactatcctctaaccttctctccctcttaaacactttcgagaccaacttagcatcttccattacaaagcttgtccccaaggaaaagtcccagatcctcaccctttcatggatgagtcaagctatggcgtctctttgccagacccacaacgctatcaagactcttataaccgatctagagcttcctgtctcagattgggaggacaaatgggtcgacatctacctagacatcagcgtcaagctcctcgacctctgcaacgccttcagctcggagctaagccgtctcaaccaaggccatctcttcctccagtttgctctgcataacttggggaccaacgctcctcagaatctgccgaaagctcaatcgtccctcgacgcctggaagcagcacatcgtttccaagaacccgaggttggagagctgtcatgcgatcctgaccagccttgttcagaccttgaatctccccaaggtgaagaactccgccaaaggcaaagtccttatgcgagctttgtacggtgtaaaggtcaagactctgtacatttctggtgtcttcgctgctgccttctcgggttcatcgcagaaccttctgtacgttacggtctcaaacgagcttccgtgggcaccttccttcatggatatgcagaacacgatgaactccgaaatcaagaacatatttttatcagacggtttaaccgttatgaaagagctcgaggctgttgattcaggtgttaagcaacttgcccctgcgatccaacaagggtctatagatcccatttcgctgcagccgttgaaggactcggtcacggagttgacgagtgggatagaccttgtttccaaggaggtggattgcttcttcaagattctgttatcggggagggacactttgctggagaacctcaggtcgattggcgcaccaacaacggtgctggcaacatcaccaaaaaagcagagagtgtaa

SEQ ID NO: 282 - protein, 344 aa, Brassica napus
MARPQDPPRGFFPFGNPFKNLSSKNPVLSSNLLSLLNTFETNLASSITKLVPKEKSQILTLSWMSQAMASLCQTHNAIKTLITDLELPVSDWEDKWVDIYLDISVKLLDLCNAFSSELSRLNQGHLFLQFALHNLGTNAPQNLPKAQSSLDAWKQHIVSKNPRLESCHAILTSLVQTLNLPKVKNSAKGKVLMRALYGVKVKTLYISGVFAAAFSGSSQNLLYVTVSNELPWAPSFMDMQNTMNSEIKNIFLSDGLTVMKELEAVDSGVKQLAPAIQQGSIDPISLQPLKDSVTELTSGIDLVSKEVDCFFKILLSGRDTLLENLRSIGAPTTVLATSPKKQRV

SEQ ID NO: 283 - DNA, 1083 bp, Brassica napus
atgagccaccgtataaaagatcatccaccaagagtgttcttccgctgtggaaacccattcaagaatctatttcccaagaccaacaatgcacgcatatccccaaatcttctctcactgttgaacagtttcgagacaaacttgatgttatcaattagagaacttataccaaagggtgatgggaatgctattctcacagtttcttggatgaaggaagcaatggcatctctgtgtgagacacacaagagtatcaggacactcgtgaccgatctagagcttcatgtctcggacttggaagaaaactttatttatatctactctagcattagctcgaacctgcttgaactctgcaactccttcacctcagagctcgaccgtctcaaccacggaagcctattactcaagtttactttgagcaagctggagactagcagttgttctgaggaaatttatttgttgcatcttgagagctggaggcagcacatggcttccaagaacccgaggttcgaaaactggggcgcgattttgagcagtcttgttgaatcgttgaaacaacatcatcatagtctccccaagaagaaactatctggaaaaggaaaagtcctcctacgagctctatacggtgtacaggtcaagactctgtacataaccagcgtgtttgctgcagtgttttctcgttcttcgaataatctcttgtatctaaccattccaaatatggaggaggttccatggacgcaagctttcatggaactgcagaacatggttaacccggagatcaaaaacgcattcttatcagacaggttcacggttattaaagatctagaggcagttgaattaggtgtgaagaagcttcacacagcagtccaagaagggtcggatactaatgtattggtggaggtattgaagaaatcagtgattaaactctcggagaggtttgatcttgtctccaaggaaacaggttgcttgctgaagacagtgatctctgctcgagacgcattggtggagaggctgtggaccaaatatgaagaggagttaggagttaaattgcccatgatgataagtgttaagagacttgtttgtgaatag

SEQ ID NO: 284 - protein, 360 aa, Brassica napus
MSHRIKDHPPRVFFRCGNPFKNLFPKTNNARISPNLLSLLNSFETNLMLSIRELIPKGDGNAILTVSWMKEAMASLCETHKSIRTLVTDLELHVSDLEENFIYIYSSISSNLLELCNSFTSELDRLNHGSLLLKFTLSKLETSSCSEEIYLLHLESWRQHMASKNPRFENWGAILSSLVESLKQHHHSLPKKKLSGKGKVLLRALYGVQVKTLYITSVFAAVFSRSSNNLLYLTIPNMEEVPWTQAFMELQNMVNPEIKNAFLSDRFTVIKDLEAVELGVKKLHTAVQEGSDTNVLVEVLKKSVIKLSERFDLVSKETGCLLKTVISARDALVERLWTKYEEELGVKLPMMISVKRLVCE

SEQ ID NO: 285 - DNA, 1050 bp, Brassica napus
atgagccgaccacatgatccaccacgaggtttcttcccatttgggaacccctttcggttgctatcaccaaagagctcagctttatccccctggctgctctctctactcaccggctttgagttgcttttagcagagaggctaaagaaactcatccccaagaacaaagacgacatcctcactctatcatggatgaagctagctatggagtccctctgcgagactcataagaacatcaacacactcatcactgacctccaccttcccgtctctgattgggaagagaaatgggttgatgtttatctagatataagcgtcaagttgctagacctctgcaacgcctttagctcggagctcacaagactcaaccagggagatctctacctcaaatgtgttcttcacagtttacagtctggttccggggagaagaagtatcttcaatctcggtcttctcttgatagctggaggcaacatgtgaacgcaaacaacgctaggattgaaacctgccgtgaggtgctagactgtcttgctaagtctctgaccttgcctagagtcaagagctcggcgaaagggaaggttcttatgagggctttctacggtgtgaaggttcaaacggtttatatctgcagcgtattcaccgcggcctggtctgattccactaatgatctttttgacttacatgtctctgagaagccgttgtgggcaaaggtcttcactgatatgcagggcgttgtgaacggtgagattagagacttgttgtcttcaggtagaagtacgattctcaaagagctggagagggttgatgctagtgtggagaagctgtacccgatgattcaagatggtgttgatgatcctgtggaagttgagacttttaaggactgtgtgatggagttggggatacaagctgagaaactgtctcagggtttggatcagttactagaggaagttgagagtttcttcaaaatgattttaagtggacgagatgtgttgctttgtaatcttaggtcaagtgacttaatctctggcaatgtatttggagaatatgtaggttaa

SEQ ID NO: 286 - protein, 349 aa, Brassica napus
MSRPHDPPRGFFPFGNPFRLLSPKSSALSPWLLSLLTGFELLLAERLKKLIPKNKDDILTLSWMKLAMESLCETHKNINTLITDLHLPVSDWEEKWVDVYLDISVKLLDLCNAFSSELTRLNQGDLYLKCVLHSLQSGSGEKKYLQSRSSLDSWRQHVNANNARIETCREVLDCLAKSLTLPRVKSSAKGKVLMRAFYGVKVQTVYICSVFTAAWSDSTNDLFDLHVSEKPLWAKVFTDMQGVVNGEIRDLLSSGRSTILKELERVDASVEKLYPMIQDGVDDPVEVETFKDCVMELGIQAEKLSQGLDQLLEEVESFFKMILSGRDVLLCNLRSSDLISGNVFGEYVG

SEQ ID NO: 287 - DNA, 1038 bp, Brassica oleracea
atggctcgtccacaagaccctccacgcggtttcttcccttttggaaaccctttcaagaacctatcctccaagaacccagtactatcctctaaccttctctccctcttgaacactttcgagaccaacttagcatcttccattacaaagcttgtccccaaggaaaagtcccagatcctcaccctttcatggatgagtcaagctatggcgtctctttgccagacccacaacgctatcaagactcttataaccgacctagagcttcctgtctcagattgggaggacaaatgggtcgacatctacctagacatcagcgtcaagctcctcgacctctgcaacgccttcagctcggagctaagccgtctgaaccaaggccatctcttcctccagtttgctctgcataacttggggaccaacgctcctcagaatctgccgaaagctcaatcgtccctcgacgcctggaagcagcacatcgtttccaagaacccgaggttggagagctgtcatgcgatcctgaccagccttgttcagaccttgaatctccccaaggtgaagaactccgccaaaggcaaagtccttatgcgagctttgtacggtgtaaaggtcaagactctgtacatttctggtgtcttcgctgctgccttctcgggttcatcgcagaaccttctgtacgttacggtctcaaacgagcttccgtgggcaccttccttcatggatatgcagaacactatgaactccgaaatcaagaacatatttttatcagacggtttaaccgttatgaaagagctcgaggctgttgattcaggtgttaagcaacttgcccctgcgatccaacaagggtctatagatcccatttcgctgcagccgttgaaggactcggtcacggagttgacgagtgggatagaccttgtttccaaggaggtggattgcttcttcaatattctgttatcggggagggacactttgctggagaacctcaggtcgattggcgcaccaacaacggtgctggcaacatcaccaaaaaagcagagaggattctga

SEQ ID NO: 288 - protein, 345 aa, Brassica oleracea
MARPQDPPRGFFPFGNPFKNLSSKNPVLSSNLLSLLNTFETNLASSITKLVPKEKSQILTLSWMSQAMASLCQTHNAIKTLITDLELPVSDWEDKWVDIYLDISVKLLDLCNAFSSELSRLNQGHLFLQFALHNLGTNAPQNLPKAQSSLDAWKQHIVSKNPRLESCHAILTSLVQTLNLPKVKNSAKGKVLMRALYGVKVKTLYISGVFAAAFSGSSQNLLYVTVSNELPWAPSFMDMQNTMNSEIKNIFLSDGLTVMKELEAVDSGVKQLAPAIQQGSIDPISLQPLKDSVTELTSGIDLVSKEVDCFFNILLSGRDTLLENLRSIGAPTTVLATSPKKQRGF

SEQ ID NO: 289 - DNA, 1065 bp, Glycine max
atgagccgttcacaggatccacacccttcccgatctttcttcccttttggaaatccttttcggatgatatcacctaaaggctctcgcatgtctccacaacttcttgcagtgttgcaagcttttgaggcaacattggcagagaggctgaaaaatcttatgcctaaaagcaaggatgaaatcctcaccttgtcttggatgactttagctatgaagtcactttgtgaaagtcacaatgacatacggacccttatgactgcccttgagcttcctgtgagtgattgggaggacaaatggattgatgtgtacttggacataagttcaaagttgctagacatttgcaatgcattcagctctgagctttcacgtctgaaccagggaaaccttcctcttaagtgtgcactgcacaatttagactctgcctcttcaaagcagtatcttcgggcatgttccctacttgatgattggaggcagcatgttagttctaggaaccctagaattgagaaatgtagttctatgttagataatcttgtgggctcacttgatcttcctaaggttaaaaattctgccaaaggaaaggttttgatgcaagctatgtatggagttaaggtggagactgtatttatttgcagggtgtttactgcagcattctctggctcgtcaaagaagttatcagacttgaatgtggccgacatacattcatgggctccagattttagaaggttgcaggatcttgtaaatgaggaaattagagttagattttctggtggtaaatttactgtattgaatgagttggaagcggttgatgcctctgtgaagatattatatcctactatccaagctggtgtagataccgttgagacagaatggcttgtgaagactgttgaggaattacgtgcgggtgctgagaagctttcacaaggaattgatcttcttgcaaagggagtagatgggttttttcaagccgttatgactagtcgcgatactttgctcagctctgtgaggtttgataaaactgtaaatgatcgttccccaggccgtaacagagacatgcaggtagttcactaa

SEQ ID NO: 290 - protein, 354 aa, Glycine max
MSRSQDPHPSRSFFPFGNPFRMISPKGSRMSPQLLAVLQAFEATLAERLKNLMPKSKDEILTLSWMTLAMKSLCESHNDIRTLMTALELPVSDWEDKWIDVYLDISSKLLDICNAFSSELSRLNQGNLPLKCALHNLDSASSKQYLRACSLLDDWRQHVSSRNPRIEKCSSMLDNLVGSLDLPKVKNSAKGKVLMQAMYGVKVETVFICRVFTAAFSGSSKKLSDLNVADIHSWAPDFRRLQDLVNEEIRVRFSGGKFTVLNELEAVDASVKILYPTIQAGVDTVETEWLVKTVEELRAGAEKLSQGIDLLAKGVDGFFQAVMTSRDTLLSSVRFDKTVNDRSPGRNRDMQVVH

SEQ ID NO: 291 - DNA, 1059 bp, Glycine max
atgagtcgggcacaggatgcaaaccaatcattcttcccttttggaaatccttttaggatgatatcacctaaaagccctaaaatttcttcacagctgttgttaattctacatgcttttgaagcaactttggaagagaggctgaaaaagcttattcccaagagcaaggatgagatcctcagcttgtcttggatgactttggctatgcagtcactttgtgagagccataatgacattaaaaccatcataacagagcttgagcttcctgtacatgattgggatgagaaatggatagacgtgtacttggacattagtgtgaagttgctagatatatgcattgcatttagctctgaattatcacgcctgaaccagggtcatcttttacttcagtgtgcattgcacaatttaggttcttcctcttcagagcagtatgttcgggcatgttcttcacttgatggttggaaacagcatattggttctggaaaccctaggattgagaaatgtggcagcattttggatgatcttctgcggtcacttgatcttccaaaggttaaaaagtccgctaaaggaaaggttttgatgcaagctatgtatggagtaaaggtgcagacagtatttgtatgcagtgtgtttgctgcggctttttcgggctctacaaagaatatgtcagatttgaatgtggctgatgtatattcttgggctccaacctttaaaagtttgcaagatcttgtaaatgaggaaattagagtaagattttcaagtgggagatttactatattgaatgagttggaagtagttgattcctctgtgaaggaattatatcctattatccagggcattgcagataccattgagacagaatcacttgcgaagattgttggggaattaagcagagcaacagagaagctttcacaaggactagatcttcttacaaaggaagtcgatagctttttccaagtggtcttgaccggtcgtgataccttgctatctagtctgaggtcaggtgcaactttcattgacagcattcaggcgggtaacagagatgcacaaatagtcaattga

SEQ ID NO: 292 - protein, 352 aa, Glycine max
MSRAQDANQSFFPFGNPFRMISPKSPKISSQLLLILHAFEATLEERLKKLIPKSKDEILSLSWMTLAMQSLCESHNDIKTIITELELPVHDWDEKWIDVYLDISVKLLDICIAFSSELSRLNQGHLLLQCALHNLGSSSSEQYVRACSSLDGWKQHIGSGNPRIEKCGSILDDLLRSLDLPKVKKSAKGKVLMQAMYGVKVQTVFVCSVFAAAFSGSTKNMSDLNVADVYSWAPTFKSLQDLVNEEIRVRFSSGRFTILNELEVVDSSVKELYPIIQGIADTIETESLAKIVGELSRATEKLSQGLDLLTKEVDSFFQVVLTGRDTLLSSLRSGATFIDSIQAGNRDAQIVN

SEQ ID NO: 293 - DNA, 1053 bp, Glycine max
atgagccgggcacaggatgcaaaccgatcattcttcccttttggaaatccttttaggatgatatcaccgaaaggcccaaaaatttcttcacagctgttgttaatattacatgcttttgaagcaactttggaagagaggctgaaaaagcttattcccaagagcaaggatgagatcctcagcttgtcttggatgactttggccatgcaggcactttgtgagagtcataatgacattaaaaccctcataacagagcttgagcttcctgtacatgattgggatgagaaatggatagatgtgtacttggacattagtgtgaagttactagatatatgcattgcatttagctctgaattatcacgcctgaaccagggtcatcttttacttcattgtgcattgcacaatttaggttcttcctcttcagagcagtatgttcgggcatgctcttcacttgatggttggaaacagcatattggttctggaaaccctaggattgagaaatgtggcagcattttggataatcttctgcggtcacttgatctgccaaaggttaaaaagtctgctaaagggaaggttttgatgcaagctatgtatggagtaaaggtgcagacagtatttttatgcagtgtgtttgctgcggctttttcgggctctacaaagaatatgtcagatttggatgtggctgatgtatattcttgggctccaacctttaaaagtttgcaagatcttgtaaatggggaaattagagttagaagtgggcgatttactatattgaatgagttggaagtagttgattcctctgtgaaggaattatatcctattatccagggcgtctcagatgccattgagacagaatcacttgcgaagattgttggggaattaggcagagcaacagagaagctttcacaaggactagatcttcttacaaaggaagtcgatagctttttccaagtggtcttgactggtcgtgatgccttgctatctagtttgaggtcaggtgcaactttcattgacagcattcaggcgggtaacagagatgcacaaatagtcaattga

SEQ ID NO: 294 - protein, 350 aa, Glycine max
MSRAQDANRSFFPFGNPFRMISPKGPKISSQLLLILHAFEATLEERLKKLIPKSKDEILSLSWMTLAMQALCESHNDIKTLITELELPVHDWDEKWIDVYLDISVKLLDICIAFSSELSRLNQGHLLLHCALHNLGSSSSEQYVRACSSLDGWKQHIGSGNPRIEKCGSILDNLLRSLDLPKVKKSAKGKVLMQAMYGVKVQTVFLCSVFAAAFSGSTKNMSDLDVADVYSWAPTFKSLQDLVNGEIRVRSGRFTILNELEVVDSSVKELYPIIQGVSDAIETESLAKIVGELGRATEKLSQGLDLLTKEVDSFFQVVLTGRDALLSSLRSGATFIDSIQAGNRDAQIVN

SEQ ID NO: 295 - DNA, 1077 bp, Medicago truncatula
atgagtcgttcacaggatccacacccaaaccgttctttcttccctttcggaaatccttttcggacaaagtcacataaaggcggctctcacatgtccccacagttacttgcagtactacatggtttcgaggcaacattagcagagaggctaaggaagcttatgcccaagagcaaggatgaaatccttagcttggcttggatgactttggctatgaagtcactttgtgaaactcataatgacatacgtacccttataactgatcttgagctaccagtgagtgtttgggatgacaaatgggttgatgtctactttgacataagtacaaagttgctagacatttgcaacatatttagttctgagctttcacgtttgaatcaaagcaatcttccgcttaagtgtgccttgcacaatttaggtccagcctcatcaaagtcgtttgttcgggcatgttccttactcgatgactggaggcgccacattaatgctaagaaccctagaattgagaaatgtagcaccattctagatggtcttgtaggatcacttgatcttcctaaggttaaaaattctgctaaaggtaaggctttgatgcaagctatgtatggagtcaaggtggagaccgcatttgtctgcagtgtgttttctgcagcattctctggctcttcaaagaagttgctagacttggacgtgcctgacatgcattcatgggcgcctgcttttataagcttacagaatcttgtaaatgaggaaattagagttaggttatctggtgggaaattttctgtattgatcgagttggaagctgttgatgctgttgtgaaggagttatatccgactatccaaggtggtgtaaataccgaagacaaagttgagcaagaatcgcatttgaagactgttgaggaattaggtgtggctgcagagaagctttcccaaggaatggatctccttgcaaagggagtggatggtttcttccaagcagttttgactagtcgtgacactttgctatcgtctctgaggtttggcaaaactgtaaatgatcgtgtcgttggccgaaacttagatcagcaagtagtttactga

SEQ ID NO: 296 - protein, 358 aa, Medicago truncatula
MSRSQDPHPNRSFFPFGNPFRTKSHKGGSHMSPQLLAVLHGFEATLAERLRKLMPKSKDEILSLAWMTLAMKSLCETHNDIRTLITDLELPVSVWDDKWVDVYFDISTKLLDICNIFSSELSRLNQSNLPLKCALHNLGPASSKSFVRACSLLDDWRRHINAKNPRIEKCSTILDGLVGSLDLPKVKNSAKGKALMQAMYGVKVETAFVCSVFSAAFSGSSKKLLDLDVPDMHSWAPAFISLQNLVNEEIRVRLSGGKFSVLIELEAVDAVVKELYPTIQGGVNTEDKVEQESHLKTVEELGVAAEKLSQGMDLLAKGVDGFFQAVLTSRDTLLSSLRFGKTVNDRVVGRNLDQQVVY

SEQ ID NO: 297 - DNA, 1059 bp, Trifolium pratense
atgagtcgtccacaggatccacccagatcgtttttcccctttggaaatcctttccggatgatatcacctaaaggcactacgttatctccgcaactgctggctgtattatctgcctttgaggctactttggaagagaggctgaaaaagcttattcccaaaagcaaggatgaagtcgtcagcttgtcttggatgacttcggctatgcaggcactttgtgaaagtcacaatgacattaaaactctcatgacagaccttgagcttcctgtgactgattgggaagagaaatggatggatgtgtacttggacattagtgtgaagttgctggatatatgcattgcatttagctccgagttatcacgtctgaaccagggccatcttttacttcagtgcacgttgcaccatttaggctcctcctcatcagatcagcttttcctggcatgttcttcacttgatggttggaggcagcatgttagttcaaaaaaccctagaattgaaaaatgtggcagcattttggataatctggtgaggtcatctgatcttccaaaggttaaaaagtcggcaaaaggaaaggttttgatgcaagctatttatggagtaaaggtgttgacagtttttgtgtgcagtgtgtttgctactgctttttcaggctctacaaagaacttgattgatatggatgtatctgatgtgtattcttgggctccaacttttaaaggtctgcagaatcttgtaaatgaggaaactagagttagattttctagtgggagaattactgtattgaacgagttggaagcagttgattcgtctgtgagggaattataccctattatccaaggtgttgtagaaactattgacacaaaatcacatgcgaagacggttgagaaattaggcagagcaacacagaatttctcccaaggactagatcttcttgtaaaggaagttgatggctttttccaagtggtcttgtctggtcgtgatgccttgctatctaatctgaggtcagctgtaactgtcaatggcgacatcttggggagtaacggagatgcacaagcagtcaattga

SEQ ID NO: 298 - protein, 352 aa, Trifolium pratense
MSRPQDPPRSFFPFGNPFRMISPKGTTLSPQLLAVLSAFEATLEERLKKLIPKSKDEVVSLSWMTSAMQALCESHNDIKTLMTDLELPVTDWEEKWMDVYLDISVKLLDICIAFSSELSRLNQGHLLLQCTLHHLGSSSSDQLFLACSSLDGWRQHVSSKNPRIEKCGSILDNLVRSSDLPKVKKSAKGKVLMQAIYGVKVLTVFVCSVFATAFSGSTKNLIDMDVSDVYSWAPTFKGLQNLVNEETRVRFSSGRITVLNELEAVDSSVRELYPIIQGVVETIDTKSHAKTVEKLGRATQNFSQGLDLLVKEVDGFFQVVLSGRDALLSNLRSAVTVNGDILGSNGDAQAVN

SEQ ID NO: 299 - DNA, 1062 bp, Juglans hindsii x regia
atgagccgtccacaagaaccacaccagcctttcttccattttgggaatcctttccgaaggttatcaccaaagggttctcatctgcctcgaaagcttctttcactgttgaacaattttgaggaaacattggcagggaggctggaaaagctaaacccagatgacaaggaagaaatccttagcttgtcatggatgaaatccgcaatggagtcgctttgtgaaactcataatgacattaaaacactcataaccgaccttgatctccctgtttctgattgggatgagaaatggatagatgtgtacttggacatcagtgtgaacttgcttgatatatgcattgcatttagctctgagctatcccggctgaaccagggaaacctgttgcttcagtgcgtgctgcacaatttggaaccctcctgttcaaaaccctttatccgtgcccgttcttcccttgatagctggagtcgtcatatcaggtcaaagaaccccagagttgaaaactgttgcaccattttggacaagcttgtggagtcaattgatcttcccaaggttaagaattcagccaaggggaaggttttgatgagtgctatgtatggagttaaggtgcagacgatatttatctgtagtgtctttgcagccgccttctcaggttctccgcaaaagttgatagaattggatgttgctgacaaatatgtatgggcacaagtgtttacctgtctgcagactagcattaatggggaaattagaaacatgttttcgggtggaagatttacagttttgaaggagcttgaagcggttgatacaagtgtcaagaaattgcatcccatgatccaagatggggatgaccccgttgaagcagaagcattccagaattctgtttcagatttggcaatgagaggggagaaactttcacaaggactagatctacttacaaaggaagtggatagctttttccaaatagttttaactgggcgtgatgctctgctttctaacttaagattaactgttactgactctgacacaaagcttgggagcaatgtattagaacgagttctgagtcgatga

SEQ ID NO: 300 - protein, 353 aa, Juglans hindsii x regia
MSRPQEPHQPFFHFGNPFRRLSPKGSHLPRKLLSLLNNFEETLAGRLEKLNPDDKEEILSLSWMKSAMESLCETHNDIKTLITDLDLPVSDWDEKWIDVYLDISVNLLDICIAFSSELSRLNQGNLLLQCVLHNLEPSCSKPFIRARSSLDSWSRHIRSKNPRVENCCTILDKLVESIDLPKVKNSAKGKVLMSAMYGVKVQTIFICSVFAAAFSGSPQKLIELDVADKYVWAQVFTCLQTSINGEIRNMFSGGRFTVLKELEAVDTSVKKLHPMIQDGDDPVEAEAFQNSVSDLAMRGEKLSQGLDLLTKEVDSFFQIVLTGRDALLSNLRLTVTDSDTKLGSNVLERVLSR

SEQ ID NO: 301 - DNA, 1056 bp, Populus trichocarpa
atgagtcgaccacaagagccacaccgccctttcttcccattcggaaatcctttcaggatgctatcttcaaagggttctcaactgtccccaagacttctttctctattaaatgcttttgaggatgctttggcagcaaggttgcggaaacttaatcctaaagacaagtatgatgttcttagcttggcatggatgaaattggcaatggagtcactctgtgagactcatactgacataaaaaccctcaccaccgaacttgatctccctgtgactgactgggatgagaagtggatagatgtgtacttggacatcagtgtgaaattgcttgatatttgtgttgcttttagttctgagctcttgcgcctgaaccaaggtcatctcatgcttcattgtgccctgcataatttggagtccaacacttcagagaagcttgtgcgggcacgttcttctatagatagctggagacagcacattggctcaaagaaccctagactggaaaactgtaaatccatcctggatggtcttgtggattcactgagtctgccaaaggttaagaactcagccaaaggaaaggtgttgatgcaagctatgtatggagttaagatacatacagtgtttgtatgtagtgtcttagctactgtgttttcaggtaattcaaagaatctgttagatttggatgttgccaacacaacaatgtgggtgcaagctttttctgatttgcaaactaatgtaaatggaggaattagagatatattttctcaaaggaaatttactgccttgaaagaattagatgaagttgatactgctgtgaagaatttatatcccatgatccaagatggtacgaggcctattgaagctgaagcattcagtaattctttttcagatttggggaggagagcagaaaaactttcccaagggctagattttcttactaaggtagtagatggctttttcaaaatagttttaagtgggcgtgatgctttgctttgtaacttgagagtgtctgatactgttgctgacccattcccagggagcaatggggaacagtttgtaagatag

SEQ ID NO: 302 - protein, 351 aa, Populus trichocarpa
MSRPQEPHRPFFPFGNPFRMLSSKGSQLSPRLLSLLNAFEDALAARLRKLNPKDKYDVLSLAWMKLAMESLCETHTDIKTLTTELDLPVTDWDEKWIDVYLDISVKLLDICVAFSSELLRLNQGHLMLHCALHNLESNTSEKLVRARSSIDSWRQHIGSKNPRLENCKSILDGLVDSLSLPKVKNSAKGKVLMQAMYGVKIHTVFVCSVLATVFSGNSKNLLDLDVANTTMWVQAFSDLQTNVNGGIRDIFSQRKFTALKELDEVDTAVKNLYPMIQDGTRPIEAEAFSNSFSDLGRRAEKLSQGLDFLTKVVDGFFKIVLSGRDALLCNLRVSDTVADPFPGSNGEQFVR

SEQ ID NO: 303 - DNA, 1065 bp, Populus trichocarpa
atgagtcaaccacaacagccacaccgccctttctttccatttggaaatcctttcaggatgttatctccaaagggttctcagttgtctccaaggcttctttctttattaaatacatttgaggaggcattggcagcgaggttgcggaaacttaatcctaaagacaagggtgatgttcttagcttcacgtggatgaaattggcaatggagtcactctgtgagactcatactgtcataaaaacacttatcacagaacttgagctccctgtgactgaatgggatgagaagtggatagatgtgtacttggacatcactgtgaagttgcttgatatttgcattgcttttagctctgagctctcgtggctgaaccaaggtcaactttttcttcaatgcgccctgcataaattggagtccaacaattcagagaagttaatgcaggcatgttcttccctagatagctggagacagcacattggctccaagaacccaagactggaaaactgtaaatccatcttagagaatcttgtggattccttgactctgcctaaggttaagaactcggccaaaggaaaggtgttgatgcgtgccatgtatggagttaaggtacagacagtatttgtatgtagtgtttttgccgctgcattttcagttaattcaaagaatctgatagatttggatgtacccaacacaatattgtgggcacaagcttattctgatttgcaaactacagtaaatggagaaattagagaagtattttctcgtgggaaatttactttcttgaaagaattagatgaagttgagacagttgtgaataatttatatcccatgatccaagatggtatgggacctactgaagtggaagcattcagcagttctttttcggatttggggaggagagcagaaagactttctcaggtgctagattttcttgctaaggaagtagatggctttttcaaaatagttttaagtgggcgtgatgctttgctttgtaacctgagagtgtctgataccgttgccgacccattccgagggagtaattctgagggaataatggggaacaggttatag

SEQ ID NO: 304 - protein, 354 aa, Populus trichocarpa
MSQPQQPHRPFFPFGNPFRMLSPKGSQLSPRLLSLLNTFEEALAARLRKLNPKDKGDVLSFTWMKLAMESLCETHTVIKTLITELELPVTEWDEKWIDVYLDITVKLLDICIAFSSELSWLNQGQLFLQCALHKLESNNSEKLMQACSSLDSWRQHIGSKNPRLENCKSILENLVDSLTLPKVKNSAKGKVLMRAMYGVKVQTVFVCSVFAAAFSVNSKNLIDLDVPNTILWAQAYSDLQTTVNGEIREVFSRGKFTFLKELDEVETVVNNLYPMIQDGMGPTEVEAFSSSFSDLGRRAERLSQVLDFLAKEVDGFFKIVLSGRDALLCNLRVSDTVADPFRGSNSEGIMGNRL

SEQ ID NO: 305 - DNA, 1059 bp, Gossypium hirsutum
atgagccgtcctcaagaaccacaacgctctttcttccattttggaaatcctttccgttcaccaaagggttctcatttgccttctggacttctttctttattggataagtttgagaaaaccttgtcagagaggctgcagaaacttgtgcctaaagacaagagtgacatccttagcttgtcatggatgaaactagcaatggaatcactttccgagattcaccgtgacataaaagacctgataactgagcttgagatccctgtgactgattgggatgagaaatggatagatgtgtatctggacatcagtgtaaagttgcttgatattactattgcttttacctctgaacttacaaggctcaaccaaggccatctcttacttcagtgtgtcttgcataagttggaatccaactcctcggatcagttcctgcgggcttgttcctcacttcatagctggagagagcaaattcgctcaaaaaatcccagagttgaaacatgtcgtcctgtactggacaaccttgtggaatcattggacttgccgaaggtaaggaactctgctaaggggaaggttctgatgcatgcaatggacggagctaaggtggcgaccacatatatctgtagtgtctttgccgcagctttctctagttctactgataatttgttagatttgaattcgactgttcctgctacactgccatgggcacaagttttctataatgttcaaacaactgtgagtacggaaattaaaaatatattttctcgtggagaatttacggttcttagagaacttcttgctgttgataattgggccaataaattgtatcctttgcttcaagacgggttcagtcctgctcaagaggaatcgttcaagcattccgtttctgaattgaggaagacagcagaggagctatcgcaagggctggataatatttcaaaggtagtagatgactttttcaaaatagttttgtctgggcgtgatgctttgctttgtaatctaagagcaggttgtgcttccccaaattcagttctgggaagaaacacagacgagcaaattgtgaggtga

SEQ ID NO: 306 - protein, 352 aa, Gossypium hirsutum
MSRPQEPQRSFFHFGNPFRSPKGSHLPSGLLSLLDKFEKTLSERLQKLVPKDKSDILSLSWMKLAMESLSEIHRDIKDLITELEIPVTDWDEKWIDVYLDISVKLLDITIAFTSELTRLNQGHLLLQCVLHKLESNSSDQFLRACSSLHSWREQIRSKNPRVETCRPVLDNLVESLDLPKVRNSAKGKVLMHAMDGAKVATTYICSVFAAAFSSSTDNLLDLNSTVPATLPWAQVFYNVQTTVSTEIKNIFSRGEFTVLRELLAVDNWANKLYPLLQDGFSPAQEESFKHSVSELRKTAEELSQGLDNISKVVDDFFKIVLSGRDALLCNLRAGCASPNSVLGRNTDEQIVR

SEQ ID NO: 307 - DNA, 1041 bp, Aquilegia sp.
atgagtcgtgcacatgaaggtcagcgaccattcttccctattggaaaccctttccggatgattttccccaaggagacgcacttgtctccacaccttctgaaactgttaaattcatttgagcaaaccttggctgatagactgaagaagcttaggccaaaagacaagaatgatgtaattagcttttcatggatgacattcgccatgaagtgtctttgtgaaattcatactgacattaaggtccttatcactgagcttcagttacctgtttctgaatgggaccagaaatggatggatgtatacttggacaacagtgtgaggcttcttgatatatgcattgcctttaactcggagctgtcacggctaggccagggacagctgttgcttcaatgtgttcgacatgccttagatgtctcgagttctctcccatcatcagtgcagctcgccaagtctcatacttctcttgatgaatggatgcaacagatcagtgcaaagaatacaaaaattgaaaactgttctagcattttacatgcgcttgctggatctcttcattcacccaaaattaaagattcggccaaaggaaaagttttgatgcgagctatgtatggggttagagttgtatctatatttgtctgtagtgcatttgcaacagctttctctggttcttcgaaaacagtaatgagcttgcaggtttctgataagctattgtgggcaaaggcctttgatgatgtgcagtctgatgtaaatggagagattagaaggttatctcaaggaaatatgacaatattgaaggaactagaagcagtcgactcaagtgtgaagaagctatatcctttgactcaaaatgggtcttatcctaccaaagacggatctttgaagacttctgtcttggatttgggaaatcagatggagagattttcacaagggctagattttctctcgaaagaggtggagagttttttccagattgttttaactggccgtgatgctttactttgcaatcttagaagtcatggttctatctctgaccccaagcaagactaa

SEQ ID NO: 308 - protein, 346 aa, Aquilegia sp.
MSRAHEGQRPFFPIGNPFRMIFPKETHLSPHLLKLLNSFEQTLADRLKKLRPKDKNDVISFSWMTFAMKCLCEIHTDIKVLITELQLPVSEWDQKWMDVYLDNSVRLLDICIAFNSELSRLGQGQLLLQCVRHALDVSSSLPSSVQLAKSHTSLDEWMQQISAKNTKIENCSSILHALAGSLHSPKIKDSAKGKVLMRAMYGVRVVSIFVCSAFATAFSGSSKTVMSLQVSDKLLWAKAFDDVQSDVNGEIRRLSQGNMTILKELEAVDSSVKKLYPLTQNGSYPTKDGSLKTSVLDLGNQMERFSQGLDFLSKEVESFFQIVLTGRDALLCNLRSHGSISDPKQD

SEQ ID NO: 309 - DNA, 1059 bp, Malus x domestica
atgagtcgtccacaggaaccacaccgaccattcttccattttggaaatccttttaagatgattgcaccaaagggttcccaactgtctccaaggcttgttggactgttgaacacgtttgaggaaacattggctgggaggctaagaaagcttaacccaaaagacaaggatgatgtcctcagcttgtcatggatgaaattagctatggagtctctctgtggaactcataatgacataaaatctctcatagctgaaatcgatctccctgtgagtaactgggatgagaaatggattgatgtgtacttggacatcagtgtgaagttgctcgatgtatgcattgcttttagctctgagatctcacgtttaaaccaggggcatctttatcttcaatgcgtcttgcataatttggattcaacttcttcggaccaatttattcgggcccgttcttcacttgatggatggaggcatcatattggttcaaaaaaccccagagttgagaactgtagcaccattttagacaagcttgtggaatcccttgaccttccaaaggttaagaactcagcaaaagggaaacttttgatgcgtgctatgtatggagtgaaggtgttgacaatatctgtttgtagtgtctttgctgccgccttttctggttctgcaaagaagttgttagatttgaatgttgctgatacatatttgtgggcacaagcgtttaacgatttacagggtaatgtaaatggggaaattagaaatgtactttctagtggaagagtcatggtactgaaggagctggaagcagttgatgatactgtcaaggaaatggatcccaagatccaggatggcgttgacctcagtgaaaggaatgcattcaagaattctatttcagacttagacaggaaggcacagaaactctcccaagggctcgatcttcttacaaaggaagttgatggatttttccaaatccttttagccgggcgtgacacattgctttccaaactaagatcaggtggagcagtctcagaccggatgctgacgggaaatgtggaaggtcagtttgtgagatga

SEQ ID NO: 310 - protein, 352 aa, Malus x domestica
MSRPQEPHRPFFHFGNPFKMIAPKGSQLSPRLVGLLNTFEETLAGRLRKLNPKDKDDVLSLSWMKLAMESLCGTHNDIKSLIAEIDLPVSNWDEKWIDVYLDISVKLLDVCIAFSSEISRLNQGHLYLQCVLHNLDSTSSDQFIRARSSLDGWRHHIGSKNPRVENCSTILDKLVESLDLPKVKNSAKGKLLMRAMYGVKVLTISVCSVFAAAFSGSAKKLLDLNVADTYLWAQAFNDLQGNVNGEIRNVLSSGRVMVLKELEAVDDTVKEMDPKIQDGVDLSERNAFKNSISDLDRKAQKLSQGLDLLTKEVDGFFQILLAGRDTLLSKLRSGGAVSDRMLTGNVEGQFVR

SEQ ID NO: 311 - DNA, 1056 bp, Citrus sinensis
atgagtcgcccccaggatccacaccgtcctttcttcccatttggaaatccttttcggatgatgtcccccaaaggttctcgtttgtctcccaagcttgtatctctgttggctgattttgaggagaccttggcagagaggctgagaaaacttatgccgaaagacaaggatgatatcctcaacttatcatggatgagactggcaatggagtcactttgtgagactcacaatgtcataaaagaccttataactgagttggagcttcctgtaagtgactgggatgagaaatggatagacgtgtacttagacatcagtgtaaacttgcttgatatatgcattgcttttagctctgttctcacgaaggtcagccaaggccacctattgcttcagtgtgtcttgcacactttggattcttcctctccaacacagtttgggcgagcctgttcttctcttgataactggagggagcacattagttcaaagaaccccagagttgagagctgtcgttcaatcttagacaatctggtagcttctttggatttgcccaaggttaagaactcagccaaagggaaggttttgatgcgcgcaatgtatggggttaaggtgttgactgtatttgtttgtagtatttttgctgcagccttctctggatcagccaagaatttgttagaactgaacgtttctgacacattaccttgggcaccagcattttctgccttgcaagctaatgtgaatgcagaagttaggaacatattatcctctggaagagctacagttttgaacgaactagaggctgttgatgggagcgttaagaaattgtatgaggtgattcaaaatgaggttgacactgttgaagaggaactgctccagaaatctgttttggatttgggaaagagggcagataacctttctcaagggctagatcatcttacaaaggcagtggatggctttttcaaaatagttttgagtgggcgtgatgctttgctttgtaatctaagagcaactggtactgcccctgacatactagtagggaggaatgcagaacctgtcaggaggtga

SEQ ID NO: 312 - protein, 351 aa, Citrus sinensis
MSRPQDPHRPFFPFGNPFRMMSPKGSRLSPKLVSLLADFEETLAERLRKLMPKDKDDILNLSWMRLAMESLCETHNVIKDLITELELPVSDWDEKWIDVYLDISVNLLDICIAFSSVLTKVSQGHLLLQCVLHTLDSSSPTQFGRACSSLDNWREHISSKNPRVESCRSILDNLVASLDLPKVKNSAKGKVLMRAMYGVKVLTVFVCSIFAAAFSGSAKNLLELNVSDTLPWAPAFSALQANVNAEVRNILSSGRATVLNELEAVDGSVKKLYEVIQNEVDTVEEELLQKSVLDLGKRADNLSQGLDHLTKAVDGFFKIVLSGRDALLCNLRATGTAPDILVGRNAEPVRR

SEQ ID NO: 313 - DNA, 1056 bp, Poncirus trifoliata
atgagtcgcccccaggatccacaccgtcctttcttcccatttggaaatccttttcggatgatgtcccccaaaggttctcgtttgtctcccaagcttgtatctctcttggctgattttgaggagaccttggcagagaggctgagaaaacttatgccgaaagacaaggatgatatcctcaacttatcatggatgagactggcaatggagtcactttgtgagactcacaatgtcataaaagaccttataactgagttggagcttcctgtaagtgactgggatgagaaatggatagacgtgtacttagacatcagtgtaaacttgcttgatatatgcattgcttttagctctgttctcacgaatgtcagccaaggccatctattgcttcagtgtgtcttgcacactttggattcttcctctccaacacagtttgggcgagcccgttcttctcttgataactggagggagcacattagttcaaagaaccccagagttgagagctgtcgttcaatcttagacaatctggtggcttctttggatttgcccaaggttaagaactcagccaaagggaaggttttgatgcgcgcaatgtatggggttaaggtggtgactgtatttgtttgtagtatttttgctgcagccttctctggatcagccaagaatttgttagaactgaacgtttctgacacattaccttgggcaccagcattttctgccttgcaagctaatgtgaatgcagaagttaggaacatattatcctctgggagagctccagttttgaacgaactagaggctgttgatgggagcattaagaaattgtatgaggtgattcaaaatgaggttgacactgttgaagaggaactgctccagaaaactgttttggatttgggaaagagggcagataacctttctcaagggctagatcatcttacaaaggcagtggatggctttttcaaaatagttttgagtgggcgtgatgctttgctttgtaatctaagagcaactggtactgtccctgacatactagtagggaggaatgtagaacctgtcaggaggtga

SEQ ID NO: 314 - protein, 351 aa, Poncirus trifoliata
MSRPQDPHRPFFPFGNPFRMMSPKGSRLSPKLVSLLADFEETLAERLRKLMPKDKDDILNLSWMRLAMESLCETHNVIKDLITELELPVSDWDEKWIDVYLDISVNLLDICIAFSSVLTNVSQGHLLLQCVLHTLDSSSPTQFGRARSSLDNWREHISSKNPRVESCRSILDNLVASLDLPKVKNSAKGKVLMRAMYGVKVVTVFVCSIFAAAFSGSAKNLLELNVSDTLPWAPAFSALQANVNAEVRNILSSGRAPVLNELEAVDGSIKKLYEVIQNEVDTVEEELLQKTVLDLGKRADNLSQGLDHLTKAVDGFFKIVLSGRDALLCNLRATGTVPDILVGRNVEPVRR

SEQ ID NO: 315 - DNA, 1056 bp, Capsicum annuum
atgagtgcaccacaggaatcgcatcgcccttatctccgatttgggaatcctttcaaaatgatgtcacccaagggctcatacttgtcttctaagcttcttgccctgttgaattcatttgaggagacattagcagggagacttaagagtcttaagcctgcagacaaggaagatatccttaagctgtcatggatgaaacaagcaataagcacactttgtgcaattcatacagatgtgaaaactcttattactgatctcgggcttcctgtatctgactgggatgagaagtggattggtgtctacttggataatagtttgaagatgctggatatgtgcgttgcatacagctctgagatttccaggcttagccaaggccacctttaccttcagtgcggcttgcacaacctggatggctcctctgcacagttcatgaaggctcgttcgtcattggatggatggaagcagcacattaattcaaagaaccagagactggagaattgctttgccatcttggacagccttactgaatcactgaacctacccaagatcaagaattctgcaaaagggaaggttctgatgcacgcaatgtatggagtgagggttgcaactgttttcatatgtagcatattcgctgtcgcattctcgggttctgctgagaaattgaaggatctgcagattcacgagactttattgtggacagaagcttttgttgatcttcgtgattttattagtggagagatcaggagcatatattctggaggaaggttcacagtactgaaggagcttgaagcagtggatgttggtgtgaagaagttatacccagtcacacaggatggaatagaccctaccgactcagaacagttggaacttctaactttagatctgactaaaaaagcagaaagtttttccgaaggactagatctcttagcaaaggagacagataggttctttcaaatccttttaaccggacgtgatgctttgctttgtaaccttagagttggtagtacagtcaaaccagtgcagccaaacaacaatgtacatgaacaaatggtgaagtga

SEQ ID NO: 316 - protein, 351 aa, Capsicum annuum
MSAPQESHRPYLRFGNPFKMMSPKGSYLSSKLLALLNSFEETLAGRLKSLKPADKEDILKLSWMKQAISTLCAIHTDVKTLITDLGLPVSDWDEKWIGVYLDNSLKMLDMCVAYSSEISRLSQGHLYLQCGLHNLDGSSAQFMKARSSLDGWKQHINSKNQRLENCFAILDSLTESLNLPKIKNSAKGKVLMHAMYGVRVATVFICSIFAVAFSGSAEKLKDLQIHETLLWTEAFVDLRDFISGEIRSIYSGGRFTVLKELEAVDVGVKKLYPVTQDGIDPTDSEQLELLTLDLTKKAESFSEGLDLLAKETDRFFQILLTGRDALLCNLRVGSTVKPVQPNNNVHEQMVK

SEQ ID NO: 317 - DNA, 1056 bp, Ipomoea nil
atgagtcgtccacaggagccacaccgaccatttttctcgtttggaaatcccctcagaatgatattacctaagggctcacacctgtctccaagacttatttctttgttgaagtcttttgaggagtcattggcaggtaagcttaaaagtctcattcctggaggcggggaagatgtcataagcttattatggatgcagcaagcaattgtttcactttctcaaatccatatagaaactaaagaacttataactgcacttgaatttcctgtatctgattgggatgagaagtggattgatgtgtacttggacaacagtgtgaggttactggatatttgtacttctatcagctctgagatcacaaggatcaaccaagccaatctttttcttagctgtgctgtgcattacctggagggtgaagaaaaacaaattatgcaagcatgctcatcattgaatggatggaggcagcatatgaattctcaaaatccaagattggagcgatgctttgagaagttgaacaccctcactgaaagtttgaacttacctaagataaaaaattctgcaaaagggaaggttttgatgcaagctttgtatggagtccggatggtaaccattttcatttgcagtgtgtttgctgttgctttctcagggtctgtgggcaacttgaaggagctagaggtcctcgagacttgcctatgggccgatgcttatgttgatctgcagggtttcattaacagggaaatgaggaacatatattctagtggagcagcaacagcattgaaggaccttgaagccattcatgcaagtgtggagaaactgcatcccatcatacaggatggagtaaaccctatcggagctgatgtattgccacacgagacttcaggtttggcaaagatggcagatcgactttccaaaggactcgatggtttggcaaaggaagttgatggattcttccaaattgttcttactggacgtgatgctttgctttgtaacctaagaattgggagcaacaatgccagcccatcacaagagaacaatgcagaacagccaactctgaggtga

SEQ ID NO: 318 - protein, 351 aa, Ipomoea nil
MSRPQEPHRPFFSFGNPLRMILPKGSHLSPRLISLLKSFEESLAGKLKSLIPGGGEDVISLLWMQQAIVSLSQIHIETKELITALEFPVSDWDEKWIDVYLDNSVRLLDICTSISSEITRINQANLFLSCAVHYLEGEEKQIMQACSSLNGWRQHMNSQNPRLERCFEKLNTLTESLNLPKIKNSAKGKVLMQALYGVRMVTIFICSVFAVAFSGSVGNLKELEVLETCLWADAYVDLQGFINREMRNIYSSGAATALKDLEAIHASVEKLHPIIQDGVNPIGADVLPHETSGLAKMADRLSKGLDGLAKEVDGFFQIVLTGRDALLCNLRIGSNNASPSQENNAEQPTLR

SEQ ID NO: 319 - DNA, 1089 bp, Ipomoea nil
atgagtcgtccacaagatcctcaacgtccctatttaccatttaagaatcccttttcgatgatattacctaagggctcacacctgtctccgaggcttcttgctctgttgaatgctttcgaggaatcattggcagagaaactcagaagtctgatgcacagaggcaggggaaatgccctaagtgtatcgtggatgaaagaagcaatggcttcactctctacaatccatacagatattaaaatacttgtaactgaacttgaacttcctgtatgtgactgggacgataagtggatagatgtttacatggacaatagtgtgagcttgctggatatttgcactgctttcagctctgagatcttgaggcttaaccaagccaacctttaccttcggtgcactgtgcgtaacctagatggtgaaccaaagcagtttgtacgagcccgttcatcattggatggatggaggcagcgtgtgaattccaaaaacccacgactcgagaatagctttgcgatcttggaccgcctcactgaaagcctgaaattccccaagaaaaaagattctgcaaaagggaaagttttgatgcaagctttgtatggagtgcaggtgataaccattttcttgtgcagtttagttgccagtggcttctcgggttccataaagaaactgaagcagtttgaggttctcgagggttgctcgtgggcagaagcttttgctaatctgcagagtttgattaacaacgaaatcagtggaggggtaacagcaccgaaggagcttgaagcagttgacgcaattgtcaagacgctataccccatgattgagtcggggggatcaaacccagcggaagctggaggattgcaaaacgcgacttcagagttggcaaagaacacagacaaattggcggaggggctggatgtattggcaaaggaagtagatggattcttccaaattgtgctgacagggcgcgacgcgatgctttctaacattagagttggcagtaagatctcccaacaagataagaaaaaatgtagaggtgcaaatagtgagacaaacaacaggggacatgtatcttcttttgtacacaaaggggctgcttag

SEQ ID NO: 320 - protein, 362 aa, Ipomoea nil
MSRPQDPQRPYLPFKNPFSMILPKGSHLSPRLLALLNAFEESLAEKLRSLMHRGRGNALSVSWMKEAMASLSTIHTDIKILVTELELPVCDWDDKWIDVYMDNSVSLLDICTAFSSEILRLNQANLYLRCTVRNLDGEPKQFVRARSSLDGWRQRVNSKNPRLENSFAILDRLTESLKFPKKKDSAKGKVLMQALYGVQVITIFLCSLVASGFSGSIKKLKQFEVLEGCSWAEAFANLQSLINNEISGGVTAPKELEAVDAIVKTLYPMIESGGSNPAEAGGLQNATSELAKNTDKLAEGLDVLAKEVDGFFQIVLTGRDAMLSNIRVGSKISQQDKKKCRGANSETNNRGHVSSFVHKGAA

SEQ ID NO: 321 - DNA, 1059 bp, Nicotiana benthamiana
atgagtcgtccacaggaaccacaccgcccttttctcccgtttggaaatcctttcaaatttatattacctaagggctcgtacttgtctcctaaacttcttgctctgttgaatgcttttgaggagtcattagcagagagggttaaaagtcttaagcctgcagataaggaagatattctcactttatcatggatgacacaagcaataagtgtactttgtgcaattcatacagatgtgaaaactctcattactgaacttgagtttcccgtatgtgactgggatgagaagtggatagatttgtacttggacaacagtgtgaagttgctggacacttgcattgccttcagttctgatatctcaaggctcgtccaaggctgcctttatcttcagtgtggcttgcataacttggatggaacctcaaagcagttcatgaaagcccgttcgtcattggatggatggaagcatcatatccaatcaaagaacccaaggctggagaaatgctttgccatcttggacagcctcgccgagtcactgaacctacctaaaatcaagaattccgcaaaagggaaggttctgatgcgagcaatgtacggagtgagggtggtaactgtattcatattcagcatgtttgctgtcacattttcgggttctacaaagaagttgaaagatctggtggttcatgaaacttgcttgtggacagaagcatttgttgatcttcgcgattttatcagtggggagatcaggagtatttatttgaagggaaggctcacagcgctgaaagagctcgaagcagtggatacaagtgtgaagaagttgtaccctatcatagaggatggagtagacgctaacgaagctgaacagttgcagcttctaactttaggactgactgaaaaggcagaaaaactttcagaaggactagatctgctagcaaaggaggcagatagattcttccaaatccttttaactggacgcgattctttgctttgtaaccttagagttggtagtaccgtctctaacctagcacaagcgaacaactatctagaaagaacagaagtgagatga

SEQ ID NO: 322 - protein, 352 aa, Nicotiana benthamiana
MSRPQEPHRPFLPFGNPFKFILPKGSYLSPKLLALLNAFEESLAERVKSLKPADKEDILTLSWMTQAISVLCAIHTDVKTLITELEFPVCDWDEKWIDLYLDNSVKLLDTCIAFSSDISRLVQGCLYLQCGLHNLDGTSKQFMKARSSLDGWKHHIQSKNPRLEKCFAILDSLAESLNLPKIKNSAKGKVLMRAMYGVRVVTVFIFSMFAVTFSGSTKKLKDLVVHETCLWTEAFVDLRDFISGEIRSIYLKGRLTALKELEAVDTSVKKLYPIIEDGVDANEAEQLQLLTLGLTEKAEKLSEGLDLLAKEADRFFQILLTGRDSLLCNLRVGSTVSNLAQANNYLERTEVR

SEQ ID NO: 323 - DNA, 1059 bp, Nicotiana benthamiana
atgagtctcccacaggaaccacaccgcccttctctccgatttggaaatcctttcaaaatgatattacccaagggctcatacttgtcacctaggcttcttgctctgttgaatgcttttgaggggacattggcagggaggcttaggagtcttgagcctggaggcaaggaagatatccttagcctatcatggatgaaacaaacaatagccacactttgtgcaattcatacagatgtgaaaactcttattactgatcttgagcttcctgtatccgactgggatgagaagtggattgatgtctacttggacaatagtttgaagatgctggatatgtgcattgcctacagctctgagatatccaggcttagccaaggccacctttatcttcaatgcggcttgcacaacttggatggctcctcaacacagttcatgaaggctcgttcttcattggacggatggaagcatcatattaattcaaagaaccacagacttgagaattgctttgccatcttggacagcctcagtgaatcactgaacctacccaagatcaagaattctgcaaaagggaaggttctgatgcacgcaatgtatggagtgagggttgtaactgttttcatatgtagcatctttgctgttgcattctcaggttccgcaaagaaattgaaggatattcaggttcacgagacttgcttgtgggctgaagcttttgttgatcttcgtgattttattagtggggagatcaggagcatatattccggaggcaagttcacagcattgaaggagcttgaagcagtagatgcaagtgtgaagaagttattccctgtcatacaggatggaatagaccctattgacgcagaacaattggaacttctaacttcagatctgactaaaaagtcagaaaaactttcggaaggactagatctcctaacaaaggagatggataagttctttcagatccttctaaccggacgtgatgctttgctttgtaaccttagagttggtagtgcagtcattaaaccagtgcaaccaaacaacaatgtacacaaacaaatggtgaagtga

SEQ ID NO: 324 - protein, 352 aa, Nicotiana benthamiana
MSLPQEPHRPSLRFGNPFKMILPKGSYLSPRLLALLNAFEGTLAGRLRSLEPGGKEDILSLSWMKQTIATLCAIHTDVKTLITDLELPVSDWDEKWIDVYLDNSLKMLDMCIAYSSEISRLSQGHLYLQCGLHNLDGSSTQFMKARSSLDGWKHHINSKNHRLENCFAILDSLSESLNLPKIKNSAKGKVLMHAMYGVRVVTVFICSIFAVAFSGSAKKLKDIQVHETCLWAEAFVDLRDFISGEIRSIYSGGKFTALKELEAVDASVKKLFPVIQDGIDPIDAEQLELLTSDLTKKSEKLSEGLDLLTKEMDKFFQILLTGRDALLCNLRVGSAVIKPVQPNNNVHKQMVK

SEQ ID NO: 325 - DNA, 1059 bp, Nicotiana tabacum
atgagtttcccacaggaaccacaccgcccttctctccgatttggaaatcctttcaaaatgatattacccaagggctcatacttgtctcctaggcttcttgctttgttgaatgcttttgaggggacattagcagggaggcttaagagtcttaagcctggaggcaaggaagatatccttagcctatcatggatgaaacaagcaataagcacactttgtgcaattcatacagatgtgaaaactcttattactgatcttgagcttcctgtatctgactgggatgagaagtgggttgatgtctacttggacaatagtttgaagatgctggatatgtgcattgcctacagctctgagatatccaggcttagccagggccacctttatcttcaatgcggcttacacaacttggatggctcctcaacacagttcatgaaggctcgttcttcgttggacggatggaagcatcatattaattcaaagaaccacagactggagaattgctttgccatcttggacagcctcaccgaatcactgaacctacccaagatcaagaattctgcgaaagggaaggttctgatgcacgcaatgtacggagtgagggttgtaactgttttcatatgtagcatctttgctgttgcattctcaggttccgcgaagaaattgaaggatcttcatgttcatgagacttgcttgtggactgaagcttttgttgatcttcatgattttattagtggggagatcaggagcatatattccggaggcaagttcacagcattgaaggagcttgaagcagtggatgtaagcgtgaagaagttatacccagtcatacaggatggaatagaccctattgactcagaacagttggaacttctaacttcagatctgactaaaaagtcagaaaaactttcggaaggactagatctcctaacaaaggagacggataagttctttcagatccttctaaccggacgtgatgctttgctttgtaaccttagagttggtagtgcagtcattaaaccagtgcaaccaaacaacaatttacataaacaaatggtgaagtga

SEQ ID NO: 326 - protein, 352 aa, Nicotiana tabacum
MSFPQEPHRPSLRFGNPFKMILPKGSYLSPRLLALLNAFEGTLAGRLKSLKPGGKEDILSLSWMKQAISTLCAIHTDVKTLITDLELPVSDWDEKWVDVYLDNSLKMLDMCIAYSSEISRLSQGHLYLQCGLHNLDGSSTQFMKARSSLDGWKHHINSKNHRLENCFAILDSLTESLNLPKIKNSAKGKVLMHAMYGVRVVTVFICSIFAVAFSGSAKKLKDLHVHETCLWTEAFVDLHDFISGEIRSIYSGGKFTALKELEAVDVSVKKLYPVIQDGIDPIDSEQLELLTSDLTKKSEKLSEGLDLLTKETDKFFQILLTGRDALLCNLRVGSAVIKPVQPNNNLHKQMVK

SEQ ID NO: 327 - DNA, 1059 bp, Solanum lycopersicum
atgagtcgtccacaggaaccacaccgcccttttctcccatttggaaatcctttcaaatttatattacctaagggctcgtacttgtctcctaagcttcttgctcttttaaatgcctttgaggagtcattgacagagagggttaagagtctcaagccaggaggtaaggaagataccctcacgttggcatggatgacacaagcaataagtacactttgtgcaattcatacagacgtgaaaactttcattactgatcttgaacttcccgtatgtgactgggatgagaagtggatagatgtgtacttggacaacagtgtgaagttactggacatttgcattgctttcagctctgatatctcaaggctcaaccaaggccacctttatcttcagtgtggcttgcataacttggatggaacgtcaaaccagttcatgaaagctcgttcctcatttgacggatggaagcagcatatcaattcaaagaacccaagattagagaattgttttgccatcttggacagcctcaccgaatcactgaacctacctaagatcaagaattctgcaaaaggtaaggttctaatgcgggcaatgtacggagtgagagtagtaactgtatttatattaagcatgtttgctgtcacgttttccggttctacaaaggagttgaaagacctgcagattcatgaaacttgcttgtggacagaagcatttgttgatgttcgcgattttatcagtcaggaaatcaggagtatatattcaagtggaaggatcacatcactgaaagagcttgaagtagtggatacaagtgtgaagaagctctatccactcatacaggatggagtagatcctaatgaagctgagcagttgcagctcttaacttcaaatctggctgaaaaggcggaaaaactttcaggaggactagatctgctagcaaaggaagcagatagattcttccatatccttttaactggacgcgattctctgctctgtaaccttagaattgataatactgtttctaacccggcggaagtgaacaacaatgtagaaaggaaagaggtgaggtga

SEQ ID NO: 328 - protein, 352 aa, Solanum lycopersicum
MSRPQEPHRPFLPFGNPFKFILPKGSYLSPKLLALLNAFEESLTERVKSLKPGGKEDTLTLAWMTQAISTLCAIHTDVKTFITDLELPVCDWDEKWIDVYLDNSVKLLDICIAFSSDISRLNQGHLYLQCGLHNLDGTSNQFMKARSSFDGWKQHINSKNPRLENCFAILDSLTESLNLPKIKNSAKGKVLMRAMYGVRVVTVFILSMFAVTFSGSTKELKDLQIHETCLWTEAFVDVRDFISQEIRSIYSSGRITSLKELEVVDTSVKKLYPLIQDGVDPNEAEQLQLLTSNLAEKAEKLSGGLDLLAKEADRFFHILLTGRDSLLCNLRIDNTVSNPAEVNNNVERKEVR

SEQ ID NO: 329 - DNA, 1062 bp, Solanum lycopersicum
atgagtctacaacaggaatcacaccgtcctcatcatcgatttggaaatccgtttaaaatgattttatcacccaagggctcatatttgtctcctaaacttcttgctctgttaaattcatttgagcagacattagcagggagacttaagagtcttaagcctggaggcaaggaagatatccttagcctttcatggatgactcaagcaataagcacactttgtgcagtccatacagatgtgaaaactcttattactgatctcgagcttcctgtatctgactgggaagagaagtggattggtgtctacttggacaatagtttgaagatgctggatatgtgcgtagcctacagctctgagatttccaggcttagccaaggtcacctttatcttcagtgcagcttgcacaagctagatggctcttcaacacagttcatgaaggctcgttcttcattggatggatggaagcagcacattaatgcaaagaaccatagactggagaattgctttgccatcttggacagtctcactgattcactgaacctacccaagattaagaattctgctaaagggaaggttctgatgcatgcaatgtatggagtgagggttgcaactgttttcatatgtagcatctttgctgttgcattctcgggttctgcagcgaaattgaaggatctgcaggttcttgagagttgcttgtggacagaagcttttgttgatcttcgtgattttgttagtggtgagatcaggggcatatattctgtagggaaattcacagcactgaaggagcttgaagcattggatgttagtgtgaagaagatatacccaatcattcaggatggagtagattctattgacgcggcacagttggaacttctaacttcagatctgactcaaaaaaatgaaaaattttcagtaggactagatctcctagcaaaggagacagataagttctttcaaatacttctaactggacgcgatgtgttgctttgtaaccttagagttggtagtgcaaccgttaaaccagcccaaccaaacaacaatgtacataaacaaatggtgaagtga

SEQ ID NO: 330 - protein, 353 aa, Solanum lycopersicum
MSLQQESHRPHHRFGNPFKMILSPKGSYLSPKLLALLNSFEQTLAGRLKSLKPGGKEDILSLSWMTQAISTLCAVHTDVKTLITDLELPVSDWEEKWIGVYLDNSLKMLDMCVAYSSEISRLSQGHLYLQCSLHKLDGSSTQFMKARSSLDGWKQHINAKNHRLENCFAILDSLTDSLNLPKIKNSAKGKVLMHAMYGVRVATVFICSIFAVAFSGSAAKLKDLQVLESCLWTEAFVDLRDFVSGEIRGIYSVGKFTALKELEALDVSVKKIYPIIQDGVDSIDAAQLELLTSDLTQKNEKFSVGLDLLAKETDKFFQILLTGRDVLLCNLRVGSATVKPAQPNNNVHKQMVK

SEQ ID NO: 331 - DNA, 1014 bp, Solanum tuberosum
atgagtcgtccacaggaaccacaccgcccttttctcccatttggaaatcctttcaaatttatattaccaaagggctcatacttgtcacctaagcttcttgctctgttaaatgcctttgaggagtcattagcagagagggttaagagtctcaagccaggaggtaaggaagatatcctcacgttatcatggatgacacaagcaataagtacactttgtgcaattcatacagacgtgaaaacacttattactgaacttgaacttcccgtatgtgactgggatgagaagtggatagatgtgtacttggacaacagtgtgaagttgctggacatttgcattgctttcagctctgatatctcaaggcttaaccaaggccacctttatcttcagtgtggcttgcataacttggatggaacctcaaaccagttcatgaaggctcgttcctcatttgacggatggaagcagcatatcaattcaaagaacccaagactagagaattgttttgccatcttggacagcctcacggaatcactgaacctacctaagataaagaattctgcaaaaggtaaggttctaatgcgggcaatgtacggagtgagagtagtaactgtattcatattaagcatgtttgctgtcacgttttccggttctacaaaggagttgaaagacctgcagattcatgagacttgcttgtggacagaagcatttgttgatgttcgcgattttatcagtcaggagatcaggagtatatattcaagtggaaggatcacagccctgacagagcttgaagtagtggatacaagtgtgaagaagttgtaccccttcatacagaatggagtagatcctaatgaagctgagcagttgcacctcctcacttcaaatctgactgaaaaggcagaaccactttcaggaggactagatctgctagccaaggaagcagatagattcttccatatccttttaaccggacgcgattctctgctctgtaaccttagcattgatagtacatgtttctaa

SEQ ID NO: 332 - protein, 337 aa, Solanum tuberosum
MSRPQEPHRPFLPFGNPFKFILPKGSYLSPKLLALLNAFEESLAERVKSLKPGGKEDILTLSWMTQAISTLCAIHTDVKTLITELELPVCDWDEKWIDVYLDNSVKLLDICIAFSSDISRLNQGHLYLQCGLHNLDGTSNQFMKARSSFDGWKQHINSKNPRLENCFAILDSLTESLNLPKIKNSAKGKVLMRAMYGVRVVTVFILSMFAVTFSGSTKELKDLQIHETCLWTEAFVDVRDFISQEIRSIYSSGRITALTELEVVDTSVKKLYPFIQNGVDPNEAEQLHLLTSNLTEKAEPLSGGLDLLAKEADRFFHILLTGRDSLLCNLSIDSTCF

SEQ ID NO: 333 - DNA, 1053 bp, Vitis vinifera
atgagtcgtccccaagaaccacaccgaccttccttcccttttgggaatcctttccgcatgatattacccaaggggtcttatctctctccaaggcttctcagtctgttaaacgatttcgagaacaccttggcagagaggctgagaaagcttaagccaaaaggcacggaagatgtgcttagctgttcatggatgaaattagcaatggagttgctttgtgaaatccataaagacataaaaattcttattaccgatcttgaactccctgtatgtgactgggatgataaatggatagatgtgtacctggacaacagtgtgaaattgcttgatatttgcattgctttgagctctgagctctcacggctcaaccaaggtcatcttttgctccagtgtgtcttgcgcaatttggatactgcttccccgaagcagcttgtgcgagcccgttcttcacttgacagttggaggcagcatattggttcaaagaaccccaaacttcagaactgtttgaccatcttggacagtcttgctgaatcaattaatctccccaagattaaaaattcagctaagggaaaagtcttgatgcgtgccatgtatggagttagggtgggcactgtatttgtctgtagtgtctttgctgctgccttcaccggatctgccaataagttgatagatttgcatgttgctgacacattcctgtggtctgaagcttttaccgatttgcagtcttatgtaaatgtagaaattagaaatacattttccagtggaagagttacagtattgaaagagttggaagcagttgatacaagtatcaataaattgtatcccatggtccaggatggtgtaggccctgctgaagatggcacgttccaaaattctgtttcagatttaggaaagagtgtggagaaactgtcagaaggcctagatctccttaccaaggatgtggatggcttcttccagatggttttaactggtcgtgatgcattgctctgtaatctaagagtaagtccgatgcacgaggataacacacaggcacgaattttgagatcaccccgatga

SEQ ID NO: 334 - protein, 350 aa, Vitis vinifera
MSRPQEPHRPSFPFGNPFRMILPKGSYLSPRLLSLLNDFENTLAERLRKLKPKGTEDVLSCSWMKLAMELLCEIHKDIKILITDLELPVCDWDDKWIDVYLDNSVKLLDICIALSSELSRLNQGHLLLQCVLRNLDTASPKQLVRARSSLDSWRQHIGSKNPKLQNCLTILDSLAESINLPKIKNSAKGKVLMRAMYGVRVGTVFVCSVFAAAFTGSANKLIDLHVADTFLWSEAFTDLQSYVNVEIRNTFSSGRVTVLKELEAVDTSINKLYPMVQDGVGPAEDGTFQNSVSDLGKSVEKLSEGLDLLTKDVDGFFQMVLTGRDALLCNLRVSPMHEDNTQARILRSPR

SEQ ID NO: 335 - DNA, 1371 bp, Oryza sativa
atgagtcgcgcacacggtagtcccagatcgttcttccctgtggggaatccctttcgagttatgtttccagggggagctcacctatctcggaagctccaagagttgctcgcttcgtacgaggatgccctggcattgagcttgaggaagctcaagccggaggccgcctcggatgtcctcaccttgtcatggatgaggcttgcagtggattgcttgtcagagctgcacaccaacatagctaacctgataaccgatctcgagctgcctgtctcggactgggatgacaaatgggtggacatttatctcaacagcagcgtgaagctgctggatatttgcatcgcgctgagctcggagctctctcgtctggatcaagggcaattgctgttgcagtatgccctgcatgtgttgggctcggagagtggcgtgccgtcgcaggagcaactcaagagagctgagccatcacttagggagtggatggagctggtgggcgtaagatgtgcaaggcttgttagctgctcggcgaccttgcaggagcttgctgggaacctttctctgatgaaggtcaagaactccgcgaaagggaaagtgctcatgagagcgttatatggaatcgagtctgtgacggtgttcgtatgcagtatttttgtagctgtactgtctggcagccccaagccactggtggagttgcatgtccctgaaaaatttggttggtctcaggccttcaatgaccttcatactgcagtcagtgaggaactcacaagacaattatccggtggaagtgttgcagctgtaaaagagctggaagaagttgaagcatgtgctagaaggctgcatgttttggctagcacttctcagcttgaagaagaagctgccaacctggcaaatgctgttagccatacagaggaagaggtcatgtcagacagcattgcgcaggaaggagaccatcactgtggtcttaaacttgctgatgacactaccagggagggtggaatagtaatttcagagagtattgcagaagggggaacacaagaagctgaaatgaagaaggatatcagctatgaaaaggaagtggcaatggttgagagaatcagttacaaagagcaccaagatagtaacgtaaagcaggcgaatggcagcagcgatgagagcgccctggttgttcctgagagaaccagtgtccaggaaagcaaggaggaactattaaactgcatatccagcatgtcgaaaagcgcggaggggctccggcatgggttggactccctatcgaagcgcgtaggcgacttctttcagatcgtgcttacgggacgtgatgcattgctctgcaacctcaggatctcagatgcagcaagcaaggtcgccgaggtcagctcttga

SEQ ID NO: 336 - protein, 456 aa, Oryza sativa
MSRAHGSPRSFFPVGNPFRVMFPGGAHLSRKLQELLASYEDALALSLRKLKPEAASDVLTLSWMRLAVDCLSELHTNIANLITDLELPVSDWDDKWVDIYLNSSVKLLDICIALSSELSRLDQGQLLLQYALHVLGSESGVPSQEQLKRAEPSLREWMELVGVRCARLVSCSATLQELAGNLSLMKVKNSAKGKVLMRALYGIESVTVFVCSIFVAVLSGSPKPLVELHVPEKFGWSQAFNDLHTAVSEELTRQLSGGSVAAVKELEEVEACARRLHVLASTSQLEEEAANLANAVSHTEEEVMSDSIAQEGDHHCGLKLADDTTREGGIVISESIAEGGTQEAEMKKDISYEKEVAMVERISYKEHQDSNVKQANGSSDESALVVPERTSVQESKEELLNCISSMSKSAEGLRHGLDSLSKRVGDFFQIVLTGRDALLCNLRISDAASKVAEVSS

SEQ ID NO: 337 - DNA, 1356 bp, Sorghum bicolor
atgagccgcgctcacgacggccacaagtccttctttccagtggggaatcccttcaggatgattttcccaagaggagcccacctgtctccgaagctcaccgagctcctcgcttcgtatgaggatggcctggcctcgagcttgaggaagctcaagccagaggccacctcagaggtgctcacgctatcatggatgaagctcgccgtggactgcttatcggagctgcacaccaatatagccaccctgattactgagcttgagctgcccttatcggactgggaccagaagtgggtggacatttacctgaacagcagtgtgaagctgctggacatctgcattgcactgagctcagagctctctcggttggatcaagggcagctgcttgtgcgatatctcctgaatgtgttggactctgggagcgacatgccatcccaggagcagctcaagaaagctgcggtgtcgcttaaggaatggatcgagcgagcaagtgaaaggtctccgaggcttgatagctgcttggcagcgctacatgagctttctgggaacctttgcctgatgaaggttaagcattctgctaaggggaaagtgctcatgcgggcattgtatggaatcgaggccgttacagtcttaatctgcagcgtccttgtagccgttctgtcaggtagcttcaagccactggtggagtttgatgtccctgagaaatttggttggtctacggccttcattgatctccgtaaggccataagtggggaacttagcactcaactatccagaggtagtgttccagctgtaaaagagctggaggatgttgaggtatgtgctagacagctgcatgcattgacttgtgctgctcagcttgaagaggagaatgctagcttggctcatgcttttagccattcaaaggaagtggtcctgccagttactacagcccaggaaggaggccatgtggataatcttaagatggctgaggacattagctgtcagcatgaagtcatcatgctgcaaagcattactacaggaggaatggatacagctgacatcaaggaggatgccaagactatcggccatacaaaagaagtgatggtgcctgataaaacaagtgacagaggacacctagatgataacgcaaagcaggccactggtgttggcactgagatcaattgcttggaaaggagagaggagctgctgaactgcatctccagcatgtcgaaaagcgctgaaaggctccggttggggttggactcactgtcgaagcgggtgggtgacttcttccagatcgtacttacagggcgtgatgcactactttgcaatctcaggatttcagatgggggcaaggttgctgcagaggtcaggtcttaa

SEQ ID NO: 338 - protein, 451 aa, Sorghum bicolor
MSRAHDGHKSFFPVGNPFRMIFPRGAHLSPKLTELLASYEDGLASSLRKLKPEATSEVLTLSWMKLAVDCLSELHTNIATLITELELPLSDWDQKWVDIYLNSSVKLLDICIALSSELSRLDQGQLLVRYLLNVLDSGSDMPSQEQLKKAAVSLKEWIERASERSPRLDSCLAALHELSGNLCLMKVKHSAKGKVLMRALYGIEAVTVLICSVLVAVLSGSFKPLVEFDVPEKFGWSTAFIDLRKAISGELSTQLSRGSVPAVKELEDVEVCARQLHALTCAAQLEEENASLAHAFSHSKEVVLPVTTAQEGGHVDNLKMAEDISCQHEVIMLQSITTGGMDTADIKEDAKTIGHTKEVMVPDKTSDRGHLDDNAKQATGVGTEINCLERREELLNCISSMSKSAERLRLGLDSLSKRVGDFFQIVLTGRDALLCNLRISDGGKVAAEVRS

SEQ ID NO: 339 - DNA, 1359 bp, Zea mays
atgagtcgtccgcatgacggtcacaggtccttctttcccatggggaatcccttcaggatgattctcccaagaggagcccgcctgccaccgaagctcactgagctgctcacttcgtatgaggatggcctggcctcgagcttgaggaaggtcaagccagaggccacctcagaggtgttcacactatcatggatgaagctcgcagtggagtgcttatcagagctgcacaccaatatagccaccctgattactgagcttgagctgcccttatcagactgggatgagaagtgggtggacatttacctgaacagcagtgtgaagctgctggacatctgcattgccctgagctcggagctctctcggttggatcaagggcagctgcttgtgcgatatctcctgaatgtgttgaactctgggagcgacatgccatcccaggagcagctcaggagagctgaggtgtctcttaaggaatggatagagcgagcaagtgaaaggtctcccaggcttgatagttgcttggcagcgctacaggagctttctggaaaccttagcctgatgaaggttaggcattctgctaaggggaaagtgctcatgcgagcattgtatggaatcgaggctgttaccgtcttaatctgcagcgtacttgtagctgtactgtcgggtaccttcaagccactggtggactttgatgtccctgagaaatttggttggtctacggccttcattgatcttcagaaggccataagcggtgaacttagcaggcaactgtccagaggtagtgttgcagctgtaaaagagctggaggatgttgatgtatgtgctaaacagctgcatacattgacttgcactgttcagcttgaagaggagaatgccagcctggctcattcatttagccgttcaaaggaagtggtcctggcagatactacagcccagggaagaggccatgcggataatctcaagttggctgatgatagtagctgtcagcatgaagtgatcatgctgcaaagtattactacagaaggaggaatggatacagctgatatcaaggaggataccgagaccattggccatacaaaggaagtgatggcgcctgagaaaataattgacagaggacaccaagatgataacacaaagcaggacactggtgttgtcactgatatcagttgcttggaaaggagagaggaactgctgaactgcatctcccggatgtcgaaaagtgctgaaaggctccagttggggttggactcgctgtcgaagcgggtggatgacttcttccatattgtgcttacagggcgtgatgcactactttgtaatctcaggttttcaaacggcggcaaggttgctgcagaggtcaggtcttaa

SEQ ID NO: 340 - protein, 452 aa, Zea mays
MSRPHDGHRSFFPMGNPFRMILPRGARLPPKLTELLTSYEDGLASSLRKVKPEATSEVFTLSWMKLAVECLSELHTNIATLITELELPLSDWDEKWVDIYLNSSVKLLDICIALSSELSRLDQGQLLVRYLLNVLNSGSDMPSQEQLRRAEVSLKEWIERASERSPRLDSCLAALQELSGNLSLMKVRHSAKGKVLMRALYGIEAVTVLICSVLVAVLSGTFKPLVDFDVPEKFGWSTAFIDLQKAISGELSRQLSRGSVAAVKELEDVDVCAKQLHTLTCTVQLEEENASLAHSFSRSKEVVLADTTAQGRGHADNLKLADDSSCQHEVIMLQSITTEGGMDTADIKEDTETIGHTKEVMAPEKIIDRGHQDDNTKQDTGVVTDISCLERREELLNCISRMSKSAERLQLGLDSLSKRVDDFFHIVLTGRDALLCNLRFSNGGKVAAEVRS

SEQ ID NO: 341 - protein, 27 aa, Artificial sequence
  motif 4
  VARIANT (4)..(4): / replace = "Thr"
  VARIANT (5)..(5): / replace = "Gln"
  VARIANT (7)..(7): / replace = "Ile"
  VARIANT (12)..(12): / replace = "Ala"
  VARIANT (13)..(13): / replace = "Ile"
  VARIANT (15)..(15): / replace = "Asn"
  VARIANT (23)..(23): / replace = "Glu"
SWMKLAMESLCETHTDIKTLITDLELP

SEQ ID NO: 342 - protein, 31 aa, Artificial sequence
  motif 5
  VARIANT (2)..(2): / replace = "Leu"
  VARIANT (4)..(4): / replace = "Asn"
  VARIANT (10)..(10): / replace = "Ile"
  VARIANT (11)..(11): / replace = "Thr"
  VARIANT (19)..(19): / replace = "Tyr"
  VARIANT (21)..(21): / replace = "Lys"
  VARIANT (23)..(23): / replace = "Val"
  VARIANT (28)..(28): / replace = "Glu"
  VARIANT (29)..(29): / replace = "Gly"
DICIAFSSELSRLNQGHLLLQCALHNLDSSS

SEQ ID NO: 343 - protein, 29 aa, Artificial sequence
  motif 6
  VARIANT (6)..(6): / replace = "Gln"
  VARIANT (8)..(8): / replace = "Leu"
  VARIANT (12)..(12): / replace = "Arg"
  VARIANT (14)..(14): / replace = "Gln"
  VARIANT (17)..(17): / replace = "Tyr"
  VARIANT (18)..(18): / replace = "Val"
  VARIANT (21)..(21): / replace = "Ile"
  VARIANT (24)..(24): / replace = "Val"
GKVLMRAMYGVKVVTVFICSVFAAAFSGS

SEQ ID NO: 344 - protein, 46 aa, Artificial sequence
  motif 7
  VARIANT (4)..(4): / replace = "Thr"
  VARIANT (5)..(5): / replace = "Gln"
  VARIANT (7)..(7): / replace = "Ile"
  VARIANT (12)..(12): / replace = "Ala"
  VARIANT (13)..(13): / replace = "Ile"
  VARIANT (15)..(15): / replace = "Thr"
  VARIANT (17)..(17): / replace = "Val"
  VARIANT (23)..(23): / replace = "Glu"
  VARIANT (32)..(32): / replace = "Glu"
  VARIANT (33)..(33): / replace = "Asp"
  VARIANT (36)..(36): / replace = "Val"
  VARIANT (42)..(42): / replace = "Asn"
SWMKLAMESLCETHNDIKTLITDLELPVSDWDEKWIDVYLDISVKL

SEQ ID NO: 345 - protein, 41 aa, Artificial sequence
  motif 8
  VARIANT (3)..(3): / replace = "Asp"
  VARIANT (7)..(7): / replace = "Ile"
  VARIANT (18)..(18): / replace = "Gln"
  VARIANT (20)..(20): / replace = "Leu"
  VARIANT (24)..(24): / replace = "Arg"
  VARIANT (26)..(26): / replace = "Val"
  VARIANT (29)..(29): / replace = "Tyr"
  VARIANT (30)..(30): / replace = "Val"
  VARIANT (36)..(36): / replace = "Val"
SLNLPKVKNSAKGKVLMRAMYGVKVQTVFICSVFAAAFSGS

SEQ ID NO: 346 - protein, 15 aa, Artificial sequence
  motif 9
  VARIANT (3)..(3): / replace = "Asp"
  VARIANT (5)..(5): / replace = "Pro"
  VARIANT (7)..(7): / replace = "Ser"
  VARIANT (9)..(9): / replace = "Leu"
PQEPHRPFFPFGNPF

SEQ ID NO: 347 - protein, 50 aa, Artificial sequence
  motif 10
  VARIANT (1)..(1): / replace = "Met"
  VARIANT (4)..(4): / replace = "Asp" / replace = "Asn"
  VARIANT (6)..(6): / replace = "Asp" / replace = "Asn"
  VARIANT (7)..(7): / replace = "Gln"
  VARIANT (11)..(11): / replace = "Val"
  VARIANT (15)..(15): / replace = "Ser"
  VARIANT (16)..(16): / replace = "Leu"
  VARIANT (19)..(19): / replace = "Ala"
  VARIANT (23)..(23): / replace = "Gln"
  VARIANT (26)..(26): / replace = "Asn"
  VARIANT (27)..(27): / replace = "Ala" / replace = "Ser"
  VARIANT (29)..(29): / replace = "Asn" / replace = "Arg"
  VARIANT (32)..(32): / replace = "Val"
  VARIANT (36)..(36): / replace = "Gln"
  VARIANT (42)..(42): / replace = "Leu"
  VARIANT (44)..(44): / replace = "Asp"
  VARIANT (45)..(45): / replace = "Asn"
  VARIANT (46)..(46): / replace = "Phe"
  VARIANT (47)..(47): / replace = "Ile"
  VARIANT (48)..(48): / replace = "Tyr"
  VARIANT (49)..(49): / replace = "Val"
VPKEKSDILTLSWMKQAMESLCETHKNIKTLITDLELPVSDWEEKWVDIY

SEQ ID NO: 348 - protein, 50 aa, Artificial sequence
  motif 11
  VARIANT (4)..(4): / replace = "Lys"
  VARIANT (14)..(14): / replace = "Leu"
  VARIANT (17)..(17): / replace = "Phe"
  VARIANT (23)..(23): / replace = "Gln"
  VARIANT (25)..(25): / replace = "Val"
  VARIANT (28)..(28): / replace = "Ser"
  VARIANT (29)..(29): / replace = "Gly"
  VARIANT (32)..(32): / replace = "Thr"
  VARIANT (35)..(35): / replace = "Trp"
  VARIANT (37)..(37): / replace = "Asp"
  VARIANT (39)..(39): / replace = "Thr"
  VARIANT (40)..(40): / replace = "Gln" / replace = "Lys"
  VARIANT (41)..(41): / replace = "Asp"
  VARIANT (43)..(43): / replace = "Leu"
  VARIANT (44)..(44): / replace = "Asp"
  VARIANT (45)..(45): / replace = "Val"
  VARIANT (46)..(46): / replace = "Pro"
  VARIANT (47)..(47): / replace = "Ile"
  VARIANT (48)..(48): / replace = "Pro"
  VARIANT (49)..(49): / replace = "Glu"
  VARIANT (50)..(50): / replace = "Lys"
LPKVKNSAKGKVLMRALYGVKVKTLYICSVFAAAFSGSSNNLFYLTVSNE

SEQ ID NO: 349 - protein, 50 aa, Artificial sequence
  motif 12
  VARIANT (1)..(1): / replace = "Leu"
  VARIANT (4)..(4): / replace = "Gln" / replace = "Pro"
  VARIANT (5)..(5): / replace = "Val" / replace = "Ala"
  VARIANT (7)..(7): / replace = "Thr"
  VARIANT (8)..(8): / replace = "Glu"
  VARIANT (9)..(9): / replace = "Leu" / replace = "Met"
  VARIANT (11)..(11): / replace = "Ser"
  VARIANT (12)..(12): / replace = "Val"
  VARIANT (13)..(13): / replace = "Met"
  VARIANT (15)..(15): / replace = "Gly" / replace = "Pro" / replace = "Ser"
  VARIANT (18)..(18): / replace = "Arg"
  VARIANT (19)..(19): / replace = "Asp"
  VARIANT (20)..(20): / replace = "Met"
  VARIANT (21)..(21): / replace = "Leu"
  VARIANT (22)..(22): / replace = "Ser"
  VARIANT (24)..(24): / replace = "Gly"
  VARIANT (25)..(25): / replace = "Arg"
  VARIANT (26)..(26): / replace = "Phe" / replace = "Ser"
  VARIANT (28)..(28): / replace = "Ile"
  VARIANT (29)..(29): / replace = "Ile" / replace = "Met"
  VARIANT (31)..(31): / replace = "Asp"
  VARIANT (34)..(34): / replace = "Ser"
  VARIANT (36)..(36): / replace = "Glu"
  VARIANT (37)..(37): / replace = "Ser"
  VARIANT (38)..(38): / replace = "Ser"
  VARIANT (40)..(40): / replace = "Glu"
  VARIANT (41)..(41): / replace = "Gln"
  VARIANT (43)..(43): / replace = "Ala"
  VARIANT (44)..(44): / replace = "Thr"
  VARIANT (45)..(45): / replace = "Met"
  VARIANT (46)..(46): / replace = "Val"
  VARIANT (48)..(48): / replace = "Gln" / replace = "Glu"
  VARIANT (50)..(50): / replace = "Val"
PWAKSFMDMQNTVNAEIKNIFLSDGLTVLKELEAVDAGVKKLYPAIQDGS

SEQ ID NO: 350 - DNA, 2194 bp, Oryza sativa; identical to SEQ ID NO: 264

SEQ ID NO: 351 - DNA, 53 bp, Artificial sequence
  primer: prm13550
ggggacaagtttgtacaaaaaagcaggcttaaacaatggctcgtccacaagac

SEQ ID NO: 352 - DNA, 53 bp, Artificial sequence
  primer: prm13551
ggggaccactttgtacaagaaagctgggtgaagtaaaaccatctgtacaaaca

SEQ ID NO: 353 - DNA, 2806 bp, Arabidopsis thaliana
tcgttgcacaattgatgagcaatgcttttttataatgccaactttgtacaaaaaagcaggcttaaacaatggatttggaagctaattgtaaggaaaaactttcatattttcggataaaagagctcaaggatgtgctcactcagctgggactttcgaaacagggaaagaagcaggaacttgtcgaccggatcttgacccttctttctgatgaacaagctgccaggttgttgtctaaaaagaatacagtggcaaaggaagcagttgccaaattagtggacgatacatataggaaaatgcaagtatctggggcaagtgatttagcatcaaaaggacaagtgagttcagataccagtaatctgaaagttaagggagagcctgaagaccccttccaaccagaaattaaagttcgatgtgtttgtggaaactcgctagaaacagactcaatgatacagtgtgaggatccaagatgccatgtttggcagcatgttggctgtgttattctcccagataagcctatggatgggaatccaccacttccggaatcattttattgtgaaatctgccgacttactcgagctgacccattttgggttacagtggcacatccactctctccagtgaggctgactgcaacgactatcccaaatgatggtgcaagcacaatgcagagtgtggagagaacatttcaaatcacaagggcagacaaggaccttttggccaaaccagagtacgatgttcaggcttggtgtatgctcttgaatgataaagttctctttaggatgcagtggcctcagtatgctgatctgcaggtcaatggtgtgcctgtacgtgcaattaatcgacctggaggacagcttttgggagtcaacggccgcgacgatggacccattattacatcttgtattagggatggagttaacagaatatccttgagtggaggtgacgttcggattttttgttttggggtcagacttgtgaagcgcaggactctacaacaggttctaaatttgattccagaagagggtaaaggggagacttttgaagatgctcttgcacgtgtccgccgatgcattggaggtggaggtggagatgataatgccgacagtgatagtgacattgaagttgttgctgatttcttcggtgtcaatcttcggtgtcctatgagcggttctaggataaaagttgctgggagatttttaccctgtgtgcacatgggctgttttgaccttgatgtgtttgtggagttgaatcaacgttccagaaagtggcagtgccctatttgtctgaagaactactcagtggagcatgtaatcgtcgatccttattttaaccgtatcacgtctaagatgaagcattgtgatgaagaggtgactgaaattgaagtgaaacctgatggttcttggcgtgtaaagttcaaaagagagagtgagcgaagggaactgggggaactctcacagtggcatgcacctgatggtagcctttgcccctctgctgttgatattaaacggaagatggaaatgttaccggttaagcaagaaggttactcagatggtccagccccgctaaaacttggaataaggaagaatcgtaatggcatttgggaagttagcaaacctaatacaaatggattatcttccagtaataggcaagaaaaggttgggtatcaggagaagaatattataccaatgagtagtagtgctactggaagtggtagggatggtgatgatgcaagcgtaaaccaggatgctattggaacttttgactttgtagccaacggcatggaacttgattccatttccatgaatgttgattcaggttataactttcctgacagaaaccaatctggcgagggtggaaataatgaagtcatcgttctgagtgattctgatgacgagaatgatttagtgatcactccagggcctgcatacagtggttgtcaaacagatggtggacttacttttccactgaaccctcctggaataattaactcatataatgaggacccacacagcatagctgggggaagttcaggcttaggtcttttcaatgatgatgatgaatttgatacgcccctttggtcatttccttctgaaactccagaagcccctgggttccaactatttagatctgatgctgacgtttcaggaggtttagttggtttgcatcatcatagtccactaaactgttctcctgaaataaatggaggttataccatggctcctgagacatcaatggcatctgttcctgtggttcctggctctactggccgatctgaagcaaacgatggcctagttgacaatcctctcgcatttggtagagacgatccctcacttcaaatatttttgccaacaaaaccagatgcttcagctcagtcgggttttaaaaaccaagctgatatgtcaaatggtctccgtagtgaagactggatctcgcttaggctaggcgatagcgcctctgggaatcatggagatcctgcaactacaaacgggattaactcaagccatcagatgtctacgagggaaggttctatggatactacaacagagactgcgtcgttgcttctgggtatgaacgacagtagacaagacaaggcaaagaagcaaagatcagataatccattttcatttcctcgccagaagcgttctgtaagacctcggatgtacctctccattgactcggattctgagtaatattcttcctgatttgtctgttctgttgacccagctttcttgtacaaagttggcattataagaaagcattgcttatcaatttgttgcaacgaacaggtcactatcagtcaaaataa

SEQ ID NO: 354 - protein, 873 aa, Arabidopsis thaliana
MDLEANCKEKLSYFRIKELKDVLTQLGLSKQGKKQELVDRILTLLSDEQAARLLSKKNTVAKEAVAKLVDDTYRKMQVSGASDLASKGQVSSDTSNLKVKGEPEDPFQPEIKVRCVCGNSLETDSMIQCEDPRCHVWQHVGCVILPDKPMDGNPPLPESFYCEICRLTRADPFWVTVAHPLSPVRLTATTIPNDGASTMQSVERTFQITRADKDLLAKPEYDVQAWCMLLNDKVLFRMQWPQYADLQVNGVPVRAINRPGGQLLGVNGRDDGPIITSCIRDGVNRISLSGGDVRIFCFGVRLVKRRTLQQVLNLIPEEGKGETFEDALARVRRCIGGGGGDDNADSDSDIEVVADFFGVNLRCPMSGSRIKVAGRFLPCVHMGCFDLDVFVELNQRSRKWQCPICLKNYSVEHVIVDPYFNRITSKMKHCDEEVTEIEVKPDGSWRVKFKRESERRELGELSQWHAPDGSLCPSAVDIKRKMEMLPVKQEGYSDGPAPLKLGIRKNRNGIWEVSKPNTNGLSSSNRQEKVGYQEKNIIPMSSSATGSGRDGDDASVNQDAIGTFDFVANGMELDSISMNVDSGYNFPDRNQSGEGGNNEVIVLSDSDDENDLVITPGPAYSGCQTDGGLTFPLNPPGIINSYNEDPHSIAGGSSGLGLFNDDDEFDTPLWSFPSETPEAPGFQLFRSDADVSGGLVGLHHHSPLNCSPEINGGYTMAPETSMASVPVVPGSTGRSEANDGLVDNPLAFGRDDPSLQIFLPTKPDASAQSGFKNQADMSNGLRSEDWISLRLGDSASGNHGDPATTNGINSSHQMSTREGSMDTTTETASLLLGMNDSRQDKAKKQRSDNPFSFPRQKRSVRPRMYLSIDSDSE

SEQ ID NO: 355 - DNA, 3988 bp, Ricinus communis
caccaaacaaaaaaagaagagagaaaagaagagaaagtcggcgttttagaaagaaactctgcaaaccctaaaacgattcctctcttcgattctttcattttgccgttatcgatcgctgtctcgagacagtgcgtggactggtttgtttggttaattgagtaatcgatgatttaaagtattgatttaggcactgaatttaaaagcttcaagttcttggagagtcaaattatggatttggtgactagttgcaaggacaaattggcctatttccgtatcaaggagctcaaagatgtacttacacagctgggtctttcaaagcaggggaagaagcaggaccttgttgacagaatattagctgttctcacagatgaacaagtaccaaagacatcagcaaagaagagtgttgttggaaaggaagaggtggcaaaactagttgatgacatttacaggaaaatgcaggtttctggggccactgatctggcatctaagggggaaggtgttttggagagcagtaagccggtcattaaaggagaaattgatgattcctttcacttcgatacaaaagttcgctgcccatgtggaagctcattggagacagaatcgatgattaagtgtgaggatcctagatgtcgggtgtggcagcatataggttgtgttataattcctgaaaaacccatggaggctattccacaagttcctgacttgttttattgtgagatctgtcggctctgccgggctgaccctttctgggtttctgttgcacatcctctttatcctgtgaagttgactactaatattcaagctgatggctcaaccccagtgcaaagcgcggagaaaacatttcatcttactagggcagacaaggacttattggccaaacaagaatatgatgttcaggcttggtgtatgcttctgaatgataaggttccatttaggatgcaatggccacaatatgcagatttacaggtcaatggtgttcctgttcgtgccatcaataggcctggttcacaattattggggattaatggccgtgacgacggtccaattattacaccatgtacaaaagatgggattaataagatatcattaaatggatgtgatgcccgtatcttctgtttaggagttcgaattgtaaagcgacgaactgttcaacagatactcaacatgatacccaaggagtctgatggtgaacgctttgaagatgcactggctcgggtatgtcgttgtgttggtggtggagcagcagacaatgctgacagtgacagtgacttggaagtagttgcagattcttttgctgttaatcttcgttgtcctatgagtggttcgagaatgaaggttgctggaagattcaaaccttgtgctcatatggggtgtttcgatcttgaagtttttctggagatgaaccagcgttctaggaagtggcagtgccctgtttgtctcaagaactactcgttggaaaatgtaataattgatccatattttaatcgtgttacatctaagatgcagcattgtggtgaagatataactgaaatagaggtgaagcctgatggttcttggcgtgcaaaaactaaaagtgaagctgaacgtagggatgttggtgaacttgcacagtggcacaaccctgatggttctctgtgtgtacctatcagtggtgaacataaatctaaagtggaaatggaaaagcagatcaaacaggaaggtaattcagaaggttataatggtactggtttaaaacttggaatcaggaagaaccgcaatggcttttgggaagttagcaaacctgaggatgtgaacacctcctcttctggtaatagattgccggaaagatttgaaatcatcgagcagaaagttatccctatgagcagtagtgccactggcagtggtcgcgatggtgaagatcctagtgtaaaccaggatggtggtgggaattttgacttcacaaacaatgggatagaacttgattctttgcctctgaatgtagattcaacatatggatttcctgatcggaacttttctgcaccagtagaggatccagaagttattgttcttagcgattcagatgatgataatgatatattgatgacaactggaactgtttacaagaatagtcaaactgatgatggaggggctggtttttcaatgccccctaatggaatttcaaatccctatcctgaagatcctacagttggaaatggtttgggctttctcaatcctaatgacgatgaattcgggatacccctgtggccgttgccacctggaagccaagctggccctgggttccagttatttaactcagatgttccagatgccttagtagatatacagcatggtcctatcagctgtcccatgacaattaatggttatacattagctccagagactgtcatgggaccttctagtttagttgcagattcttctgttggtaggtctgatactgatacaaatgatggcttggtcaataaccccttagcgtttggtggtgaagatccctctcttcaaatctttcttccaactagaccttcagatgcatctgggcagtctgatcttagggatcaggctgatgtgtcgaatggtgtccgtacagaggattggatatctcttagacttggtggtggtggtgccactggcagtcatggtgattctgtttctgcaaatggagtgaattcaagacagcagatgcctccgagagatggtgccatggactctctggctgacaccgcttctctgcttcttggtatgaatgatggtagatctgagaaggcaagtcggcaaagatctgatagccctttccaatttcctcgtcaaaaacgttctataagaccacggttgtatctctcgattgactcggactcggagtagagaagtggagccttgttttcaaagataactgttgcttttcttatgaaattctttttgggagacatttccccaatgagggtatgatgaagaaaatcatcattttgtctctaggacaatgaagtctctgatgaggcacaaggcatttacagtgggaaaatgccatcaggaaataatcatcttgaagtagtgttggcacatgaagattccgccattggtgagctgtaggcctcgtaatctcccttctcaattttgtgcggaataacctttgtttctgatgttctttgttctatcagggttattacaagcactctcaattttcagcaaagatcatgatgtccagtgctggtaaattgtatagtagataggcatttgaatctgaaaattggattaatccatagatttggctcaaatcgtcggatgtagtggggaagccccgagttagtaacacaagtatccatctttttggtctctgtttaatgatgagagcaaatagcttgtaaatgtccctcagattcagttatatttatagaaagaataagaaaatcttaattgtgcgactctgcaacttagtagtgtactttggtcctgttcaataaccagggctcaaatgttgtatatataatgtttgttctagaagccattggcatgcaggtggcagggcacttgctgctaggtgatcctgtgtcaccatgaaatccagttagaaagatgacatacagcactttgacgagctctaaatttgcttctattgcttgctgtccgggatgatcggtatgaccctcaactcctcgttcctcccgtgtttcccctttgtttccttctcggtcttaactcttgtgggcgtaattgcagtttagcaaaccagtgcttgattgaatcaggcatgaactgggtggatagtcatgtatacacatattctggatggaatcttaagatgtttaaccactctacttattacgatgttgatattttacaggatttaggtgaattatttatagttttggattgtaaattgtcctggtgttttgtatggcttgctttcttaccgcatgcttctagagggcaaagaaaaatcatatatgaactcaatatcttctgggattaattttccatatccataaccactctt

SEQ ID NO: 356 - protein, 876 aa, Ricinus communis
MDLVTSCKDKLAYFRIKELKDVLTQLGLSKQGKKQDLVDRILAVLTDEQVPKTSAKKSVVGKEEVAKLVDDIYRKMQVSGATDLASKGEGVLESSKPVIKGEIDDSFHFDTKVRCPCGSSLETESMIKCEDPRCRVWQHIGCVIIPEKPMEAIPQVPDLFYCEICRLCRADPFWVSVAHPLYPVKLTTNIQADGSTPVQSAEKTFHLTRADKDLLAKQEYDVQAWCMLLNDKVPFRMQWPQYADLQVNGVPVRAINRPGSQLLGINGRDDGPIITPCTKDGINKISLNGCDARIFCLGVRIVKRRTVQQILNMIPKESDGERFEDALARVCRCVGGGAADNADSDSDLEVVADSFAVNLRCPMSGSRMKVAGRFKPCAHMGCFDLEVFLEMNQRSRKWQCPVCLKNYSLENVIIDPYFNRVTSKMQHCGEDITEIEVKPDGSWRAKTKSEAERRDVGELAQWHNPDGSLCVPISGEHKSKVEMEKQIKQEGNSEGYNGTGLKLGIRKNRNGFWEVSKPEDVNTSSSGNRLPERFEIIEQKVIPMSSSATGSGRDGEDPSVNQDGGGNFDFTNNGIELDSLPLNVDSTYGFPDRNFSAPVEDPEVIVLSDSDDDNDILMTTGTVYKNSQTDDGGAGFSMPPNGISNPYPEDPTVGNGLGFLNPNDDEFGIPLWPLPPGSQAGPGFQLFNSDVPDALVDIQHGPISCPMTINGYTLAPETVMGPSSLVADSSVGRSDTDTNDGLVNNPLAFGGEDPSLQIFLPTRPSDASGQSDLRDQADVSNGVRTEDWISLRLGGGGATGSHGDSVSANGVNSRQQMPPRDGAMDSLADTASLLLGMNDGRSEKASRQRSDSPFQFPRQKRSIRPRLYLSIDSDSE

SEQ ID NO: 357 - DNA, 3162 bp, Vitis vinifera
atggatttagtgacttcatgcaaggacaaattggcatattttcgaataaaggagctcaaggacgtactgactcaacttggtctttcaaagcagggaaagaagcaggatctcgttgatcggatattagccattctctctgatgaacaagtttccaggatgtgggcaaagaagaatgctgttgggaaggaagaagtagcaaaactagttgaggatacttacagaaaaatgcaggtatctggagccactgacttagcatcaaagggacaggttctctcagatagcagtaatgtcaaattcaaagaagaacttgaggattcatataatgatatgaagattcgttgtccatgtggaagcgcactgccaaatgagacaatgcttaagtgcgacgatctaaaatgccaggtgtggcagcatataggttgtgttataattccagagaaaactatggagggtattccaccaactcccgacccattctactgtgaaatttgtcgactaagtcgagctgaccctttttgggttactgtggcacatcctttacttcctgtgaagttgacaacaactagtattccaactgatggtacaaacccagtgcagagtgttgagaaaacatttcatctcacaagggctgacagagacatggtatcaaaacatgagtatgatgttcaggcttggtgtattctccttaatgacaaggtttcatttaggatgcagtggccacaatatgcagacctacaagtcaatggtatggcagttcgtgctatcaatagacctggctcacagttgctaggtgctaatgggcgtgatgacggacctgttatcacaccatgtaccaaagatggaattaataagatttccttaacgggatgcgatgctcgtattttctgtttaggggttagaattgtaaagcggcgaactgttcaacagattttaagcttgattcctaaagaatcagatggtgagcgttttgaagatgcgctggctcgtgttcgtcgttgcattggtggtggaggtgcaactgataatgctgatagtgacagtgacctggaagtggttgcagatttctttactgtcaatctacgatgtcctatgagtggttcaagaatgaaggttgctggaagattcaaaccttgtgctcacatgggctgttttgatcttgaaatttttgtggaaatgaaccaacgttctaggaagtggcaatgtcccatttgtctcaagaactattctctagagaatgttatcattgatccatatttcaatcgcatcacatcctcgatgcagtcttgtggagaagatgtaactgagatacaagtgaagcctgatggttgttggcgtgtaaagcctgagaatgaacgtgggattctagcacagtggcacaatgctgatggtactctctgtccccttgctgagggagaatttaaaccaaaaatggatgtgttgaagcaaatcaaacaggaaggaatttcagaatgtcattccagtttgaaactccaaattaagaatcgcaatggggtttgggaagttagcaaacctgatgaaatgaataccctcacttgtaatagactacaagaaaagtttgaagaccctggtcagcaagttatcccaatgagcagcagtgccactggaagtggtagggatggtgaggatccgagtgtaaatcaggatggtggtgggaattatgatttttccaccaaccccgggattgagcttgattccatttctctaaacatagacaacaatgcctatgcatttccagagcgaaatactcctgcaccaatgggggatacagagcttattgttctcagtgattcagaagaagagaatgacactttgatgtcttctggaaccctttacaacaacagtagagctgatgctggtgggattaatttctcgattcctactggtattccggattcatatgcagaagatcccactgctgggcctggtgggagttcatgcttgggtctttttagtactgccgatgatgattttgggatgtctggatccctctggccattacctcctggtactcaaccaggccctggtttccaattttttggtacagatacagatgtctcagatgctttagctgatttgcagcataatcccatcaactgtcccacatcaatgaatggctacacattgggtccggaggttgtcatgggatctgctgctctagttcctgatccttccattggtcgtactgataccgacatgaatgatggcttggttgataatccgttggcctttggtggggatgacccatctcttcaaatatttcttcctacaaggccctccgatgcatcagtgcctaccgatttgagaaatcaagctgatgtgtcaaatggtagccgacctgatgattggatttctctgaggcttgggggtagcagtgggggtcatgctgaatctccagctgcaaatggattgaataccagacagcaattaccatccaaagatggtgacatggattctttggctgacactgcttctttgcttcttggtatgaatgatggtagatctgacaagacaagtagcaggcaacgatcagatagccctttttcgttccctcgccagcgacgctctgtgaggccaaggctgtatctttcgattgactcagattctgagtagagttgtttgctgagcattaccgtagccctcttgaaaattattggagatgctaccggatataacccctccccttgtgaagaggacatttcctggagtgatatgttgacccatctcttattatcaactcggtttatatttagaagaaagctttgaaggttttcatcatcaagaagtgccaagcctgaatacgggtgctaggcatgcacaggacactaagaaacgtggacgcttttaaagaacaaatgtgccggcacctgcggaatttcttgctattgggctgctacaaattcttttgccctttttgtcaatgaagatctgcaggtccagtgctggaaaattgtacattagtcatttgactggaaaccgaaaagtgaatccattgggtaaacctttgggtgtagaagggtagtccctttcagtaacacaagatataatgccctttttgtctgttttatcatcacagcacattagattgtaaaaatgccttcaccatctcagattcagatatttatagagaaacatttatttttc

SEQ ID NO: 358 - protein, 876 aa, Vitis vinifera
MDLVTSCKDKLAYFRIKELKDVLTQLGLSKQGKKQDLVDRILAILSDEQVSRMWAKKNAVGKEEVAKLVEDTYRKMQVSGATDLASKGQVLSDSSNVKFKEELEDSYNDMKIRCPCGSALPNETMLKCDDLKCQVWQHIGCVIIPEKTMEGIPPTPDPFYCEICRLSRADPFWVTVAHPLLPVKLTTTSIPTDGTNPVQSVEKTFHLTRADRDMVSKHEYDVQAWCILLNDKVSFRMQWPQYADLQVNGMAVRAINRPGSQLLGANGRDDGPVITPCTKDGINKISLTGCDARIFCLGVRIVKRRTVQQILSLIPKESDGERFEDALARVRRCIGGGGATDNADSDSDLEVVADFFTVNLRCPMSGSRMKVAGRFKPCAHMGCFDLEIFVEMNQRSRKWQCPICLKNYSLENVIIDPYFNRITSSMQSCGEDVTEIQVKPDGCWRVKPENERGILAQWHNADGTLCPLAEGEFKPKMDVLKQIKQEGISECHSSLKLQIKNRNGVWEVSKPDEMNTLTCNRLQEKFEDPGQQVIPMSSSATGSGRDGEDPSVNQDGGGNYDFSTNPGIELDSISLNIDNNAYAFPERNTPAPMGDTELIVLSDSEEENDTLMSSGTLYNNSRADAGGINFSIPTGIPDSYAEDPTAGPGGSSCLGLFSTADDDFGMSGSLWPLPPGTQPGPGFQFFGTDTDVSDALADLQHNPINCPTSMNGYTLGPEVVMGSAALVPDPSIGRTDTDMNDGLVDNPLAFGGDDPSLQIFLPTRPSDASVPTDLRNQADVSNGSRPDDWISLRLGGSSGGHAESPAANGLNTRQQLPSKDGDMDSLADTASLLLGMNDGRSDKTSSRQRSDSPFSFPRQRRSVRPRLYLSIDSDSE

SEQ ID NO: 359 - DNA, 1230 bp, Zea mays
cactgatgctgccggatctggatatcctgaaaggtaccaggaggatgctagtgttggtacaagtggtcttggtttattgaggcagaacactggtgaatttgaaataaataactggcaaatgctttcttacccacaaccagagcaagggtttcagttttttgtgactgatactgatgttggcaatccttttgttgctccacataattcctttactattgcaccagaagactactctcttggctgtaatgttggaatagaggacccctctgcagctcacgatgtttcaatttgccgaaacagtaatgatgtgcatggaagcttggttgataacccactggcattaacaggtgacgatccatctttgcaaatttttcttccaagtcaaccttccactgttccccttcagcaagaattgagtgagcgttctgatactccaaatggagtccaccctaacgattggaggatatcgcttacgcttgccgctggtggagggggcaatgaagagtctacaagtgttggcggtctaaaatcacaaccaaaagtttcatcgaaagaggcaggagttgaacctttacttgatgctgcctgtcaagcatttccaggatcatcgaggttaacttttgaagcttctgctcttggaagcatgaacaatgacagatgcactggatctaatctaaatcctaaaaggattgaaaatatattttctcatcctcgccaaccgcggtctgttaggcctcgtctgtgtttgtcattagatactgattcagagtagtttggacatcacactgggatagctgaatttgctattaatctggtaaagttggcttccagaatcttgatcgttactgtggagggctatctggttattctggttgatacaaagagatacaccagtgtggatgctttgttgcattaacctggtaagattcaagtgttctatatgatccaagtgggatctgcatagagttcatctaatggttggtacaggatattttctaactgggagtggtttaatgtggctagtggagcaggctgtacattgtccctgacatttactgggtataaaggaatagggggccatcacttggcacaagacaaatacatgtgttgtgtgtaccatcattgtatttagggtttgggtgctaatttagatgtttattaccctgacgtttgatggagaataaattattccttgaagtggtggtcaataaacagagagcccttcggttt

SEQ ID NO: 360 - protein, 217 aa, Zea mays
MLSYPQPEQGFQFFVTDTDVGNPFVAPHNSFTIAPEDYSLGCNVGIEDPSAAHDVSICRNSNDVHGSLVDNPLALTGDDPSLQIFLPSQPSTVPLQQELSERSDTPNGVHPNDWRISLTLAAGGGGNEESTSVGGLKSQPKVSSKEAGVEPLLDAACQAFPGSSRLTFEASALGSMNNDRCTGSNLNPKRIENIFSHPRQPRSVRPRLCLSLDTDSE

SEQ ID NO: 361 - DNA, 1302 bp, Zea mays
gctcccgctggcagcgccaaaacccatggcctctcgcacgaccaccccacctgctcctgcccacctccgcctccatgccgcgtccctcttcgcagctcctcccactccctcacgcgcgtgccccgcgatgctgtggtcaactcacaggccgtagacctgtctgctcccgcaaacgatgaagtcgcgaggcgtgaccgcacatgcctgatgcctccaccacccaagtcctccacccatccgccgacggtggaatagggtaacaaaaaaaagccgtcgaggacggcgccgcagccaagctcacgcaggatgcgcagcaacgagctccgactcgccctccaggcgggattcgaccccgccaggtgcggctcttgttcctagatttttacttcctgggatgaactggtgtcattgagcaaatgtgtctgcactttcgggtggaagaataactttctgcagggccaagcgccgccaaaaggcatcagcagagaagaaggcgaccgtggccgcaagggataagcagttacattcaggcgtattttaagctcgagactttgaagcaagaccttaaatttcgagtctgcaaattctcaaactaatccagcttcaactaatctgcattcctccctccgcccctagacgaggggaagcaagctacataaggaacatatccggccttcaagtatttatttcaacctcaatcaggccttgaaatttgaatgtgtaaggatctgctgctaaactattttactgctagcaagaccacaaattgtgaatttcattcagaacagctcgacatgatgtcccttcatacttatgtatcaatgcaccgttgtacaccagactttccaactttcccgagcagatagagaaacagtccagagacaagaatatgatctccaggtttggtgcatccttataaatgacaaagtccagttcaggatgcaatggcctcaatatgcagaattgcaagtgaacggtattcctgtacgagtaatgaccaggcccggttctcagttactagggataaatgggcgggatgatgggccactggtaaccacatgcagtagagaagggatcaacaaaattagcttatctagagtggatgctcgaaccttttgctttggagttcgaattgttaggaggactgttcctcaggttttgttcatttagctttctacttatcatatagttgaaatgactaggttcacatgattttctgttttgtaaatggtccctatgtattgtgaacttttatcttgtttcatgttaaatatcatctagacagcaatattttgtgttgac

SEQ ID NO: 362 - protein, 118 aa, Zea mays
MYQCTVVHQTFQLSRADRETVQRQEYDLQVWCILINDKVQFRMQWPQYAELQVNGIPVRVMTRPGSQLLGINGRDDGPLVTTCSREGINKISLSRVDARTFCFGVRIVRRTVPQVLFI

SEQ ID NO: 363 - DNA, 3158 bp, Arabidopsis thaliana
gtctgggtttggttgtctttttattttcctcttccttggccaaagaaaatcttatcgtagctgtgaaaaccctagtttctaatcatctcaattctctcattaacctatcaatttcgatagggtttgatcaagtatccgatttcatgatcggttgctgtatggagactaattgctggagtttaggttcgtgtgttttgaactgagcttttggttcttgtttgtgtctggtgttgaagacatggatttggaagctaattgtaaggaaaaactttcatattttcggataaaagagctcaaggatgtgctcactcagctgggactttcgaaacagggaaagaagcaggaacttgtcgaccggatcttgacccttctttctgatgaacaagctgccaggttgttgtctaaaaagaatacagtggcaaaggaagcagttgccaaattagtggacgatacatataggaaaatgcaagtatctggggcaagtgatttagcatcaaaaggacaagtgagttcagataccagtaatctgaaagttaagggagagcctgaagaccccttccaaccagaaattaaagttcgatgtgtttgtggaaactcgctagaaacagactcaatgatacagtgtgaggatccaagatgccatgtttggcagcatgttggctgtgttattctcccagataagcctatggatgggaatccaccacttccggaatcattttattgtgaaatctgccgacttactcgagctgacccattttgggttacagtggcacatccactctctccagtgaggctgactgcaacgactatcccaaatgatggtgcaagcacaatgcagagtgtggagagaacatttcaaatcacaagggcagacaaggaccttttggccaaaccagagtacgatgttcaggcttggtgtatgctcttgaatgataaagttctctttaggatgcagtggcctcagtatgctgatctgcaggtcaatggtgtgcctgtacgtgcaattaatcgacctggaggacagcttttgggagtcaacggccgcgacgatggacccattattacatcttgtattagggatggagttaacagaatatccttgagtggaggtgacgttcggattttttgttttggggtcagacttgtgaagcgcaggactctacaacaggttctaaatttgattccagaagagggtaaaggggagacttttgaagatgctcttgcacgtgtccgccgatgcattggaggtggaggtggagatgataatgccgacagtgatagtgacattgaagttgttgctgatttcttcggtgtcaatcttcggtgtcctatgagcggttctaggataaaagttgctgggagatttttaccctgtgtgcacatgggctgttttgaccttgatgtgtttgtggagttgaatcaacgttccagaaagtggcagtgccctatttgtctgaagaactactcagtggagcatgtaatcgtcgatccttattttaaccgtatcacgtctaagatgaagcattgtgatgaagaggtgactgaaattgaagtgaaacctgatggttcttggcgtgtaaagttcaaaagagagagtgagcgaagggaactgggggaactctcacagtggcatgcacctgatggtagcctttgcccctctgctgttgatattaaacggaagatggaaatgttaccggttaagcaagaaggttactcagatggtccagccccgctaaaacttggaataaggaagaatcgtaatggcatttgggaagttagcaaacctaatacaaatggattatcttccagtaataggcaagaaaaggttgggtatcaggagaagaatattataccaatgagtagtagtgctactggaagtggtagggatggtgatgatgcaagcgtaaaccaggatgctattggaacttttgactttgtagccaacggcatggaacttgattccatttccatgaatgttgattcaggttataactttcctgacagaaaccaatctggcgagggtggaaataatgaagtcatcgttctgagtgattctgatgacgagaatgatttagtgatcactccagggcctgcatacagtggttgtcaaacagatggtggacttacttttccactgaaccctcctggaataattaactcatataatgaggacccacacagcatagctgggggaagttcaggcttaggtcttttcaatgatgatgatgaatttgatacgcccctttggtcatttccttctgaaactccagaagcccctgggttccaactatttagatctgatgctgacgtttcaggaggtttagttggtttgcatcatcatagtccactaaactgttctcctgaaataaatggaggttataccatggctcctgagacatcaatggcatctgttcctgtggttcctggctctactggccgatctgaagcaaacgatggcctagttgacaatcctcttgcatttggtagagacgatccctcacttcaaatatttttgccaacaaaaccagatgcttcagctcagtcgggttttaaaaaccaagctgatatgtcaaatggtctccgtagtgaagactggatctcgcttaggctaggcgatagcgcctctgggaatcatggagatcctgcaactacaaacgggattaactcaagccatcagatgtctacgagggaaggttctatggatactacaacagagactgcgtcgttgcttctgggtatgaatgacagtagacaagacaaggcaaagaagcaaagatcagataatccattttcatttcctcgccagaagcgttctgtaagacctcggatgtacctctccattgactcggattctgaaacaatgaacaggatcatcagacaagacaccggagtttaaacaagatttgcataattctctgtgcaggcaagaattgaaccggatgtaatttgcaaagcgaagcactggctgatttagtttctctgatagaaaagaaaagtgggcacagtggttccgatttaattagtagtttgtatactcgaaataggttttttttgtgtggacgatgataaaattacttcgaagccaggagctatagagagatatagcaatgtaaattatgggctccaaattttatttattaattagaaaaattcagctc

SEQ ID NO: 364 - protein, 885 aa, Arabidopsis thaliana
MDLEANCKEKLSYFRIKELKDVLTQLGLSKQGKKQELVDRILTLLSDEQAARLLSKKNTVAKEAVAKLVDDTYRKMQVSGASDLASKGQVSSDTSNLKVKGEPEDPFQPEIKVRCVCGNSLETDSMIQCEDPRCHVWQHVGCVILPDKPMDGNPPLPESFYCEICRLTRADPFWVTVAHPLSPVRLTATTIPNDGASTMQSVERTFQITRADKDLLAKPEYDVQAWCMLLNDKVLFRMQWPQYADLQVNGVPVRAINRPGGQLLGVNGRDDGPIITSCIRDGVNRISLSGGDVRIFCFGVRLVKRRTLQQVLNLIPEEGKGETFEDALARVRRCIGGGGGDDNADSDSDIEVVADFFGVNLRCPMSGSRIKVAGRFLPCVHMGCFDLDVFVELNQRSRKWQCPICLKNYSVEHVIVDPYFNRITSKMKHCDEEVTEIEVKPDGSWRVKFKRESERRELGELSQWHAPDGSLCPSAVDIKRKMEMLPVKQEGYSDGPAPLKLGIRKNRNGIWEVSKPNTNGLSSSNRQEKVGYQEKNIIPMSSSATGSGRDGDDASVNQDAIGTFDFVANGMELDSISMNVDSGYNFPDRNQSGEGGNNEVIVLSDSDDENDLVITPGPAYSGCQTDGGLTFPLNPPGIINSYNEDPHSIAGGSSGLGLFNDDDEFDTPLWSFPSETPEAPGFQLFRSDADVSGGLVGLHHHSPLNCSPEINGGYTMAPETSMASVPVVPGSTGRSEANDGLVDNPLAFGRDDPSLQIFLPTKPDASAQSGFKNQADMSNGLRSEDWISLRLGDSASGNHGDPATTNGINSSHQMSTREGSMDTTTETASLLLGMNDSRQDKAKKQRSDNPFSFPRQKRSVRPRMYLSIDSDSETMNRIIRQDTGV

SEQ ID NO: 365 - DNA, 3154 bp, Arabidopsis thaliana
gtctgggtttggttgtctttttattttcctcttccttggccaaagaaaatcttatcgtagctgtgaaaaccctagtttctaatcatctcaattctctcattaacctatcaatttcgatagggtttgatcaagtatccgatttcatgatcggttgctgtatggagactaattgctggagtttaggttcgtgtgttttgaactgagcttttggttcttgtttgtgtctggtgttgaagacatggatttggaagctaattgtaaggaaaaactttcatattttcggataaaagagctcaaggatgtgctcactcagctgggactttcgaaacagggaaagaagcaggaacttgtcgaccggatcttgacccttctttctgatgaacaagctgccaggttgttgtctaaaaagaatacagtggcaaaggaagcagttgccaaattagtggacgatacatataggaaaatgcaagtatctggggcaagtgatttagcatcaaaaggacaagtgagttcagataccagtaatctgaaagttaagggagagcctgaagaccccttccaaccagaaattaaagttcgatgtgtttgtggaaactcgctagaaacagactcaatgatacagtgtgaggatccaagatgccatgtttggcagcatgttggctgtgttattctcccagataagcctatggatgggaatccaccacttccggaatcattttattgtgaaatctgccgacttactcgagctgacccattttgggttacagtggcacatccactctctccagtgaggctgactgcaacgactatcccaaatgatggtgcaagcacaatgcagagtgtggagagaacatttcaaatcacaagggcagacaaggaccttttggccaaaccagagtacgatgttcaggcttggtgtatgctcttgaatgataaagttctctttaggatgcagtggcctcagtatgctgatctgcaggtcaatggtgtgcctgtacgtgcaattaatcgacctggaggacagcttttgggagtcaacggccgcgacgatggacccattattacatcttgtattagggatggagttaacagaatatccttgagtggaggtgacgttcggattttttgttttggggtcagacttgtgaagcgcaggactctacaacaggttctaaatttgattccagaagagggtaaaggggagacttttgaagatgctcttgcacgtgtccgccgatgcattggaggtggaggtggagatgataatgccgacagtgatagtgacattgaagttgttgctgatttcttcggtgtcaatcttcggtgtcctatgagcggttctaggataaaagttgctgggagatttttaccctgtgtgcacatgggctgttttgaccttgatgtgtttgtggagttgaatcaacgttccagaaagtggcagtgccctatttgtctgaagaactactcagtggagcatgtaatcgtcgatccttattttaaccgtatcacgtctaagatgaagcattgtgatgaagaggtgactgaaattgaagtgaaacctgatggttcttggcgtgtaaagttcaaaagagagagtgagcgaagggaactgggggaactctcacagtggcatgcacctgatggtagcctttgcccctctgctgttgatattaaacggaagatggaaatgttaccggttaagcaagaaggttactcagatggtccagccccgctaaaacttggaataaggaagaatcgtaatggcatttgggaagttagcaaacctaatacaaatggattatcttccagtaataggcaagaaaaggttgggtatcaggagaagaatattataccaatgagtagtagtgctactggaagtggtagggatggtgatgatgcaagcgtaaaccaggatgctattggaacttttgactttgtagccaacggcatggaacttgattccatttccatgaatgttgattcaggttataactttcctgacagaaaccaatctggcgagggtggaaataatgaagtcatcgttctgagtgattctgatgacgagaatgatttagtgatcactccagggcctgcatacagtggttgtcaaacagatggtggacttacttttccactgaaccctcctggaataattaactcatataatgaggacccacacagcatagctgggggaagttcaggcttaggtcttttcaatgatgatgatgaatttgatacgcccctttggtcatttccttctgaaactccagaagcccctgggttccaactatttagatctgatgctgacgtttcaggaggtttagttggtttgcatcatcatagtccactaaactgttctcctgaaataaatggaggttataccatggctcctgagacatcaatggcatctgttcctgtggttcctggctctactggccgatctgaagcaaacgatggcctagttgacaatcctcttgcatttggtagagacgatccctcacttcaaatatttttgccaacaaaaccagatgcttcagctcagtcgggttttaaaaaccaagctgatatgtcaaatggtctccgtagtgaagactggatctcgcttaggctaggcgatagcgcctctgggaatcatggagatcctgcaactacaaacgggattaactcaagccatcagatgtctacgagggaaggttctatggatactacaacagagactgcgtcgttgcttctgggtatgaatgacagtagacaagacaaggcaaagaagcaaagatcagataatccattttcatttcctcgccagaagcgttctaacaatgaacaggatcatcagacaagacaccggagtttaaacaagatttgcataattctctgtgcaggcaagaattgaaccggtattgatattttcacttgtatgatgttgttgactctctcttcaatatcggttcagaatcttggccttgtctgctacactgcaggatgtaatttgcaaagcgaagcactggctgatttagtttctctgatagaaaagaaaagtgggcacagtggttccgatttaattagtagtttgtatactcgaaataggttttttttgtgtggacgatgataaaattacttcgaagccaggagctatagagagatatagcaatgt

SEQ ID NO: 366 - protein, 884 aa, Arabidopsis thaliana
MDLEANCKEKLSYFRIKELKDVLTQLGLSKQGKKQELVDRILTLLSDEQAARLLSKKNTVAKEAVAKLVDDTYRKMQVSGASDLASKGQVSSDTSNLKVKGEPEDPFQPEIKVRCVCGNSLETDSMIQCEDPRCHVWQHVGCVILPDKPMDGNPPLPESFYCEICRLTRADPFWVTVAHPLSPVRLTATTIPNDGASTMQSVERTFQITRADKDLLAKPEYDVQAWCMLLNDKVLFRMQWPQYADLQVNGVPVRAINRPGGQLLGVNGRDDGPIITSCIRDGVNRISLSGGDVRIFCFGVRLVKRRTLQQVLNLIPEEGKGETFEDALARVRRCIGGGGGDDNADSDSDIEVVADFFGVNLRCPMSGSRIKVAGRFLPCVHMGCFDLDVFVELNQRSRKWQCPICLKNYSVEHVIVDPYFNRITSKMKHCDEEVTEIEVKPDGSWRVKFKRESERRELGELSQWHAPDGSLCPSAVDIKRKMEMLPVKQEGYSDGPAPLKLGIRKNRNGIWEVSKPNTNGLSSSNRQEKVGYQEKNIIPMSSSATGSGRDGDDASVNQDAIGTFDFVANGMELDSISMNVDSGYNFPDRNQSGEGGNNEVIVLSDSDDENDLVITPGPAYSGCQTDGGLTFPLNPPGIINSYNEDPHSIAGGSSGLGLFNDDDEFDTPLWSFPSETPEAPGFQLFRSDADVSGGLVGLHHHSPLNCSPEINGGYTMAPETSMASVPVVPGSTGRSEANDGLVDNPLAFGRDDPSLQIFLPTKPDASAQSGFKNQADMSNGLRSEDWISLRLGDSASGNHGDPATTNGINSSHQMSTREGSMDTTTETASLLLGMNDSRQDKAKKQRSDNPFSFPRQKRSNNEQDHQTRHRSLNKICIILCAGKN

SEQ ID NO: 367 - DNA, 2633 bp, Arabidopsis thaliana
ttagggttattgtcgattgagcagagtaatttattccttcttcttcttcttcttcttcaaatcgtgtttctccatttcaaaatccagaaactttgtgattccacggtagttagttccaatctcaatgtctacggcggcagcggctcgtccggtggctggaactggcttacgggagaagacggcagcgtcactggtcaattccttccgattagcgtcggtgactcaacgtttacgttaccacattcaagacggagctaaggttgatcctaaggagtttcaaatctgttgcatctctttcgctaaaggcattgattttgctatagcgaataatgatattcctaagaaggttgaggagtttccgtggttactcaaacagttgtgcagacatggaactgatgtgtacactaagacggcgcttatggtgctgatgatctctgttaagcatgcttgtcatttgggatggttttcggatagcgagagtcaagaacttatcgctctagctgatgagataaggacttgttttgggagttctggaagcactagccctggtatcaaaagtcctggcagtacattttcgcagatcatggagaggttctatccatttgtaaagcttgggcatgttcttgtttcttttgaagtgaaggctggctatacaatgctggcgcatgatttttatatctcaaagaatatgccacattcactccaagagaaaattcggttatttgttgcccagacagacaacatagacacgtctgcctgtatttcaaatcctccagaagtcagcttcttgctaaatggaaagggggttgagaagagagtcaatatcgcaatggatacagggcctcaactccctacaaatgttactgcacagctgaaatatggaactaatcttctccaagtgatggggaattttaaaggaaattacatcatcataattgcttttacgggactggtagtgccacctgaaaaaccggttcttaaagattaccttcagtccggagtcattgaagcaagtccagattcagacatcattgaggggccatcacgagtatctctcagttgccctataagtcgcaagcggatcaagctaccagtcaagggccagttatgtaaacatcttcagtgttttgatttctcaaactacgttcacataaatatgaggaacccaacctggcgctgcccgcattgcaatcaacctgtttgctaccctgacattcgtttagatcaaaacatggccaagatattaaaagatgtggaacacaatgctgctgatgtaatcatcgatgctggtggtacatggaaggttacaaaaaatactggcgagaccccggaacctgtgcgtgagatcattcatgatctagaagacccgatgagcttattaaactctggtcctgttgttttcgatcttacgggggatgatgatgctgaactggaagtttttggtgacaacaaggttgaggaccggaagccctgtatgtctgatgctcagggtcaatctaataataacaacacaaataaacatccttcaaacgatgattactcttcgatatttgatatctctgatgtgatcgcacttgacccggagattttatctgctttgggaaacactgcgccacaaccgcatcaagcttcgaatactggaactggtcaacaatattcaaacttatcccaaataccaatgtccatagatccaatgccggtacctgtaccattctcgcagacaccatctccaagagatagaccagcaactacttccactgtcttcaccataccgaatccctctccacaatactctcaggttcatgcttcacctgttacacccaccggaacatatcttggtagaaccactagtccgagatggaaccagacttatcaatctcaagcgccaccaatgacaactccatatacgagccggaaggtctcagttccagtaacgagccagtcgccagcgaatgtatcctcttttgttcagtctcagcatgtccctagagtactcagccagcctaataattatggcgtcagaggtttaaccagtagccatgcaagcacttcaaggcagcacccaagtggtcccactgttcaatctgtttctcgattaagtgacctagtggatgtagacttgacggttcctgatacatccaactggcgcccgaggatgcgaggaagtcttgtgcccggttctcattccactgctcttgaccacatgatcatccgacctagccaacagtctcaaacttccactaggctgaatagttcacagccggttcagacaccatcggttcaaacgtctcaagctcagtcaccttttacaacggctgcctatagaaccgagacagttttaggaaaccgaaaccatccggtgcccgctcctcctggcattgttaggcctactggaccgacatcttgatggagaacttgagaggctagaacaaggggaagttggtacttaggagttaggacacaacacttaacataataaattagtaactttatcactttcccacgccatgaacagagtttaggattccggtgcgcaagtcgtattctgtttatgagggattagtttgtatttagcttgctgttaacttgtaatgacgatcaaactataagtgttatcaattactcttgtaccc

SEQ ID NO: 368 - protein, 760 aa, Arabidopsis thaliana
MSTAAAARPVAGTGLREKTAASLVNSFRLASVTQRLRYHIQDGAKVDPKEFQICCISFAKGIDFAIANNDIPKKVEEFPWLLKQLCRHGTDVYTKTALMVLMISVKHACHLGWFSDSESQELIALADEIRTCFGSSGSTSPGIKSPGSTFSQIMERFYPFVKLGHVLVSFEVKAGYTMLAHDFYISKNMPHSLQEKIRLFVAQTDNIDTSACISNPPEVSFLLNGKGVEKRVNIAMDTGPQLPTNVTAQLKYGTNLLQVMGNFKGNYIIIIAFTGLVVPPEKPVLKDYLQSGVIEASPDSDIIEGPSRVSLSCPISRKRIKLPVKGQLCKHLQCFDFSNYVHINMRNPTWRCPHCNQPVCYPDIRLDQNMAKILKDVEHNAADVIIDAGGTWKVTKNTGETPEPVREIIHDLEDPMSLLNSGPVVFDLTGDDDAELEVFGDNKVEDRKPCMSDAQGQSNNNNTNKHPSNDDYSSIFDISDVIALDPEILSALGNTAPQPHQASNTGTGQQYSNLSQIPMSIDPMPVPVPFSQTPSPRDRPATTSTVFTIPNPSPQYSQVHASPVTPTGTYLGRTTSPRWNQTYQSQAPPMTTPYTSRKVSVPVTSQSPANVSSFVQSQHVPRVLSQPNNYGVRGLTSSHASTSRQHPSGPTVQSVSRLSDLVDVDLTVPDTSNWRPRMRGSLVPGSHSTALDHMIIRPSQQSQTSTRLNSSQPVQTPSVQTSQAQSPFTTAAYRTETVLGNRNHPVPAPPGIVRPTGPTS

SEQ ID NO: 369 - DNA, 2883 bp, Arabidopsis thaliana
atggttattccggcgacttctaggtttgggtttcgtgctgaattcaacaccaaggagtttcaagcttcctgcatctctctcgctaacttcactgaaaactttactcctggatttggtgaatgcagtgaaatcgatgcggctattgggagaaatgaagttccagggaatattcaagagctcgctttaatcctcaataatgtgtgccgacgtaaatgtgatgattatcaaaccagggcggtggtaatggcgctgatgatctcagtcaagagtgcttgtcagcttggatggttcccggagagagagactcaagaattgttggctatcatagacttgatgtggaatggtttcagctgtcctgaaaatgtcacctcttgtgtaaatagtcccgtcactctaatatcgcaggtcattgagaggttctatccatgtgtgaagctggggcatattcttgtttcttttgaagctaagccagaatcaaagatgatgatgaaggacttccatatttcaaagaagatgccacattctcccaaacagaaagttggattatttgttgttcggacagaggacataagcagatctaattgtattgtacatccacaaggagtcagctttttgttgaatggaaagggcattgacaagagagttaacatctcaatggagtctgggccgcagcttccaactaatgttactgccctgctaaaccttggggcaaatcttctacaagcaataggctgttttggaggtagttacttgattgctattgctttcatggatgtcataccactgcccaacaaaccgttactgaaagattatgttcatcctgaagtcgttggatcaaactcagattgtgacataattgaggggccatcgaggatatctctcagttgtcctatcagccgaacgcgtatcaaacttcctgtgaagggtcatgtctgtaaacatcttcagtgttttgatttctggaattatgtcaacatgaacacaagacgacatcatggcgctgcccgcattattctagaagaagtgggacgtaatgctgcagatgtggttatctctgctgatggaacctggatggttgagacggaaaatgatgaggacgtggaacttgtgccagaaaccactcatgaccatggagacccaaatagtttcatcaacttggggcctactgttaagaatcctgccagagatgagaatgaaatggaaacatccacccaagtcgaagaacataatccttgtttatctgagattcagggtccgtcaaatgacacacataggcctgcttcagattatactatgcttaaccagtctcatacttcaaccaacacactaccacagctgccacgaactttgaatgcctttgatggtcaacaattcgtgaacttaccacaagtaataaacacccgagattcaccagcaagccaagccttacctatgacattctcaccaaccccatctccacaagatatattagctactaatgcggcaaactttggcacatcaatgccggctgctcagtcttctcagtttcaaggctcacatgttacgtcccttggaaattgtgaaggaagaacttctgatttgatggcgagatggaaccacatctatggacgtgttcaaactcaatttccacctgcacctctttcgcatcatcattattcaatgcagaatcagagcccgtcccctgcacagcaaagaccagtgccatcttacattgcacatcctcaaacttttcatgtcaactacggagagaacgctgaccaaagatggatgccgtcttccattgcacatcctcaaactttacctgttaactacggaggaaatactaaccaaagaccgataccatcttccattgcacatcctcaaactttacctgtcaactacagggggaatactgaccatagatcgacgccatattccattacacatctccaaacattacttaactacggagggaacgccgatcaaagaccaatgccatcttccattacaaatctccaaactttacctgccacgtacggagggtacgcccaccaaagaccaatgtcatcttccattacacatccccgaacttcacctgtcaactacggagggacccctgaccaaagaccaatgccatcttccattacacatccccaaactttacctgtcagctacggagggaccacagaccaaatactgaatcctggtggtgcaatgggacagttctcatcacgagagttcatgaatttgactcctgctaacactgagaattggcgcccacaaagccggatgcgaggcagcgtagcacctggtacgggatatgaccatatgatcattcatcctacccgtccagttcatccacaagctcaaacacctcctgcgcctctttcaacatcttatgatggagcagatgaaattcaagcatttatagggcacccaagctatcccgttagtaataacgaaacacaagcgggtaccagttcgttgccagtggcagagggtcttgggtattcagggtcgttttggtcaatgcctcctgagacatggtgatatctgatggcttagagattgtagcacacggtcactaacacaatcagtcagtagtaagtagtaacagtatataactaaggcctttctttttttggtacttacagctttagtcttcgggtacatatatggggctaagttcttgatgtagcgtattcgtgagatttacttcatgtgaaacattagggtatcttttggccgatttactatcacaatatagcaggttcagttcgctttcttctgctccgagaaactttttagcttcactagtggcttttgttcattgattgatatgtatttggtttatgcggaagaatgagaaagttgttgattttcacgaaataacaaaacttgaag

SEQ ID NO: 370 - protein, 842 aa, Arabidopsis thaliana
MVIPATSRFGFRAEFNTKEFQASCISLANFTENFTPGFGECSEIDAAIGRNEVPGNIQELALILNNVCRRKCDDYQTRAVVMALMISVKSACQLGWFPERETQELLAIIDLMWNGFSCPENVTSCVNSPVTLISQVIERFYPCVKLGHILVSFEAKPESKMMMKDFHISKKMPHSPKQKVGLFVVRTEDISRSNCIVHPQGVSFLLNGKGIDKRVNISMESGPQLPTNVTALLNLGANLLQAIGCFGGSYLIAIAFMDVIPLPNKPLLKDYVHPEVVGSNSDCDIIEGPSRISLSCPISRTRIKLPVKGHVCKHLQCFDFWNYVNMNTRRHHGAARIILEEVGRNAADVVISADGTWMVETENDEDVELVPETTHDHGDPNSFINLGPTVKNPARDENEMETSTQVEEHNPCLSEIQGPSNDTHRPASDYTMLNQSHTSTNTLPQLPRTLNAFDGQQFVNLPQVINTRDSPASQALPMTFSPTPSPQDILATNAANFGTSMPAAQSSQFQGSHVTSLGNCEGRTSDLMARWNHIYGRVQTQFPPAPLSHHHYSMQNQSPSPAQQRPVPSYIAHPQTFHVNYGENADQRWMPSSIAHPQTLPVNYGGNTNQRPIPSSIAHPQTLPVNYRGNTDHRSTPYSITHLQTLLNYGGNADQRPMPSSITNLQTLPATYGGYAHQRPMSSSITHPRTSPVNYGGTPDQRPMPSSITHPQTLPVSYGGTTDQILNPGGAMGQFSSREFMNLTPANTENWRPQSRMRGSVAPGTGYDHMIIHPTRPVHPQAQTPPAPLSTSYDGADEIQAFIGHPSYPVSNNETQAGTSSLPVAEGLGYSGSFWSMPPETW

SEQ ID NO: 371 - DNA, 967 bp, Hordeum vulgare
  misc_feature (923)..(923): n is a, c, g, or t
accgaagaagcagaggtgtgggggcagagagagagagagagagaggggagaagagacgaggaaagtgttggcggtgtgctcgcgccattcccgtcccctccccgcgacccggccccgccggatctcgcggacgtcggcggcgccggctcctcccgggcggcgcccccgatcggcggccgcgtccccgcccatgctcgtcgcggcagcgcgggggacccggagcgcgtgagcagggaggcgccgcgtgccacggggcgcctgtacagtcatcggcggcggccatggcggacctggcttccacctgcaaggataaactggcatactttcgaataaaggaactcaaagatatcttgcatcagttaggcctaccaaagcaaggaaagaagcaggatcttattgacagggtattggcactgttatcagatgagcaaggtcaaaggcatcatgggtggggaagaaaaaattctttcacaaaggaggcagtggcaaaaattgttgatgatatatacaggaaaatgcaaatccaatctgctcccgatctagccactaggtcccatactggatcagatttattccggcctaaagatgaagtcaacgactccttccagccacagccagtgactaaggtccgctgcatttgtgatagcaagttgctaaacgataatatgatccagtgtgaggatgatcaatgccatgtatggcaacatatgagctgtgtgctcgttccagataagcccactgagggtgttggccctgaagttccaccccatttctactgtgaattatgccgactaagtcgggcagacccgttttgggtcactacagggaatccattaccccctctaaaattcatgtcatctggtgttgcaaatgatggaacaagtgtacttcaaaccgtggagaaaaccttccaactttctcgnagcggatagggaacagttcagagatcagaatatgatctccaggt

SEQ ID NO: 372 - protein, 228 aa, Hordeum vulgare
MADLASTCKDKLAYFRIKELKDILHQLGLPKQGKKQDLIDRVLALLSDEQGQRHHGWGRKNSFTKEAVAKIVDDIYRKMQIQSAPDLATRSHTGSDLFRPKDEVNDSFQPQPVTKVRCICDSKLLNDNMIQCEDDQCHVWQHMSCVLVPDKPTEGVGPEVPPHFYCELCRLSRADPFWVTTGNPLPPLKFMSSGVANDGTSVLQTVEKTFQLSRSGGTVQRSEYDLQV

SEQ ID NO: 373 - DNA, 2667 bp, Medicago truncatula
atggatgatttggtttcaagttgtaaggaaaaattgcaatattttcgtgtaaaggatctcaaagatgtgcttactcagataggaatttcgaagcagggaaagaagcaggatcttatcgataggatattatctatcatctcagatgaacaagttgctaaagtacgggctaagaagaatgctgttgaaaaagaacaagtggtaaaattagtggaggacacatatagaaaactgcaggtatctggagccactgatatagcatcaaaggggcaggttgcttcagacagcagtaatgtgaaaattaaaggtgaagttgaggattccgttcaatcagctacaaaggttcgatgtctctgtggaagttcattggaaacagatctattgatcaagtgtgaagatagaaaatgccctgtgtcgcaacatctcaactgcgttattattccggatacacccactgaaggactcccgccaatcccagatacattttattgtgaaatatgtcgtctcagtcgtgcagacccgttctcggtttcaatgatgcaccctttacatccggtgaagttgtctacaacccttgtcccaactgaaggatccaaccccatgcagagtgttgagaaaacatttcaacttgcaagagcacacaaggacatagtattaaaatcagaatttgatattcaggcttggtgcatgcttctgaacgacaaagttccattcaggatgcaatggccacaatatgcagacctagttgtaaatggctattctgttcgtgcaattaatagacccggttcacaattgcttggggctaatggtcgcgatgatggcccaattatcacaccatatataaaagaaggagttaacaagatttctttgacggggtgtgacactcgcattttctgtttgggggtccgcattgttagaaggcgcactttgcaacagatcttgaacatgattccaaaggagtctgatggtgagcgttttgaagttgctcttgctcgtgtctgttgtcgtgttggcggtggaaattcagctgatgatgctggtagtgacagtgatctggaagtagtttcagatacttttagcatcagccttcgttgtccaatgagtggttcaagaatgaagattgcaggaagattcaaaccttgtgttcacatgggttgttttgatcttgaagtttttgtggaaatgaatcaacgctcaagaaagtggcaatgccccatatgtctcaaaaactatgcactggagaatatcattattgatccttatttcaatcgcatcacttctatgatgaaaaactgtggggaggagtttacagatgtggaggtgaagcctgatggttattggcgtgtcaaggctaagagtgaaagtgaatgccgtgagttggggaatcttgctaaatggcactgtcctgacggatcgctccctgtttctaccagtggagaagacaagagagtggaaactttgaatgtcaaacaggaaggtgtttcagacagtcctaatggcttaagacttggcattaggaaaaactgtaatggagattgggaagtcagcaaacccaaggacacaaacatctcttctgataataggttgaatgctgatttaggaaatcatgaagttgtagttattcaaatgagcagcagtggctctgaaagtagattggatggtgatgatccaagcgtaaatcagagtggtggtgggcatacagattattctcctactaatgggattgagacgaattctgtgtgtcacactaatgttgattcaacttatggatataccattcctaacacttctgctccgatggctaatgcagaagttattgttcttagcgattctgaagatgatgaaatattaatatctcctacagttggttacggaaataatcaaactggtgatgcagttgatgcttactcagtgcctccgcctggaattatggatccatatgctggagatcacagtattggtggaaatccatgcttgggagtttttgataatcccaatgaaagcatttttgggattccctcagtctggccactgcattctggaactcaggcaagctcgggattccaactattcagttctgatgtggatgtgtctgatgcattggcccatggtgatattaattgctcctcttcactgaatagttatacgttggctcctgacactgctctgggatctagtgctctaataccaaattcatccactgatcggtccgacactgatttaaatggtggtttggttgacaatccattggcatttggtggacaggatccctcacttcagatttttctccctacaagaccagcagaatcatctgtgcagcatgaattaagaaatcacacagatgtgtcgaatggtgtctgcacagaggattggatctctcttagccttgggggtggggctggtggcagtattggtgatgcttcaacaacaaatggtttgaactccagaccgcaaattcaatccagagaagatgcgccagattctttaacagattctttaaatgaggctgatttgttacttgctgagactgcttctttgcttcgtagtgtggatgatgctgaatctgacaaagcaagtaggaaaagatcagacggccctttctcatttccccgccaaaaacgttcagtaaggccccgcttgaatctttctattggttcagattcagagtag

SEQ ID NO: 374 - protein, 888 aa, Medicago truncatula
MDDLVSSCKEKLQYFRVKDLKDVLTQIGISKQGKKQDLIDRILSIISDEQVAKVRAKKNAVEKEQVVKLVEDTYRKLQVSGATDIASKGQVASDSSNVKIKGEVEDSVQSATKVRCLCGSSLETDLLIKCEDRKCPVSQHLNCVIIPDTPTEGLPPIPDTFYCEICRLSRADPFSVSMMHPLHPVKLSTTLVPTEGSNPMQSVEKTFQLARAHKDIVLKSEFDIQAWCMLLNDKVPFRMQWPQYADLVVNGYSVRAINRPGSQLLGANGRDDGPIITPYIKEGVNKISLTGCDTRIFCLGVRIVRRRTLQQILNMIPKESDGERFEVALARVCCRVGGGNSADDAGSDSDLEVVSDTFSISLRCPMSGSRMKIAGRFKPCVHMGCFDLEVFVEMNQRSRKWQCPICLKNYALENIIIDPYFNRITSMMKNCGEEFTDVEVKPDGYWRVKAKSESECRELGNLAKWHCPDGSLPVSTSGEDKRVETLNVKQEGVSDSPNGLRLGIRKNCNGDWEVSKPKDTNISSDNRLNADLGNHEVVVIQMSSSGSESRLDGDDPSVNQSGGGHTDYSPTNGIETNSVCHTNVDSTYGYTIPNTSAPMANAEVIVLSDSEDDEILISPTVGYGNNQTGDAVDAYSVPPPGIMDPYAGDHSIGGNPCLGVFDNPNESIFGIPSVWPLHSGTQASSGFQLFSSDVDVSDALAHGDINCSSSLNSYTLAPDTALGSSALIPNSSTDRSDTDLNGGLVDNPLAFGGQDPSLQIFLPTRPAESSVQHELRNHTDVSNGVCTEDWISLSLGGGAGGSIGDASTTNGLNSRPQIQSREDAPDSLTDSLNEADLLLAETASLLRSVDDAESDKASRKRSDGPFSFPRQKRSVRPRLNLSIGSDSE

SEQ ID NO: 375 - DNA, 2649 bp, Medicago truncatula
atggatttggtagccggtatcaaggaaaaattaacatatttccgtataaaagagctcaaggatgtgctgactcagttaggactttcaaaacagggaaagaagcaggatctcgtcgatcggatattatccattctctcagatgagcaagtttccaaaatatgggccaagaagaatgctgttgggaaagagcaggtggcaaaattggtggatgacacatataggaaaatgcagatatcgggagccactgatctagcatcaaagggtcaggttgtgtcagatagtagtaatgtgaaggttaaagctgaagttgaagattcctttcaaattcaaactactacaactacaaagattcgctgtctctgtggaagtacattggaaacaggggatttgatcaagtgtgatgatgccagatgccaagtgtggcaacacatcagctgtgttattattccagagaaacctatggaaggcatcccaccagttcctgataaattttattgtgaactatgtcgactcagccgtgcagacccgttttgggtttcagtatctcatcctttgttacctgtaaagttggccacaaccagtattccaactgatggtaccaacccagtgcagtgcgtggagagaacatttcaactcacaagagcagacaaggacatggtatcaaaacaagaatttgatgttgaggcttggtgtatgcttctgaacgacaaggttccattcaggattcaatggccacagtatacagaccttgcagttaatggtcttcctattcgaacaactactagacccggttcacagttgcttggagctaacggtcgtgatgatggtccaattatcacgccgcatacaaaagacggaattaataagatttccttaacagtatgtgatgctcgcattttctgtttaggtgttcgaattgttagaaggcgcagtttgcaacagatcctaaacttaattccaaaggagtctgacggtgagccttttgaagatgctcttgcacgcgtctgtcgttgtgttgggggtggaaatgcagctgacaatgctgatagcgacagtgatttggaagtggtttcagatactttcagtataagccttcgttgtccgatgagtggttcaagaatgaagattgccggaagattcaaaccttgcattcacatgggttgttttgatcttgatgtttttgtggaaatgaatcaacggtcaagaaagtggcaatgtcctatatgtctcaaaaactatgcattagagaatatcatcattgacccttatttcaatcgcatcacttctatgatgattaattgcggtgaagatgttacagaggttgaggtgaagcctgatggctcttggcgtgttaaggcaaagagtgaaagtgaacgtctggatttagggattcttggccaatggcatcttcctaatggatctctttgtacttctactgctggagatatcaagagagtagaaacactgaagcaagtaaaacaggaaggtttttcagatggacctgctggtttaaaacttggcattaggaggaatcgcaatgggaattgggaagtcagtaagccagagacaaccaacacctcttctggtcatatattaaaagaggtttttggaaatcctgaacaagttgttattccaatgagcagcagtggctccgaaagtggtcgggatggtgatgatcccagtgttaaccagggtggtggtgggcatattgattattctactaccaatggaattgagatggattctcagtctcgcaataatgttgatttagctcgtggatatactgtgcataacacatctgctcaggtgggtggggcagagataattgttcttagcgactctgaagaagacaatgacatattggtgtctcctccaattgcaaataacaaccaccaaaatgatactgcagatggttactccatgccacctcctggaattgttgacccatacgttgaagatcagaatcttggtggaagttcatgcttggggctttttcctaatgaagatgattttggaatatcttccctgtggtcattgccttctgcatctcaggctggtccaggattccaattgtttggttctgatgcagatgcctctgatgcattggttcatttgcagcatgtccctattaattgcacctcatcactgaacggttatgcattggctcccgaaactgctttgggatctggcagtctcttacaagattcctctgctggacggtcagatgctgacttaaacggtggtttggttgacaacccattggcatttgctggagatgatccctctcttcagatttttctccccacaagaccagctgagtcgtctatgcagaatgaattgagagatcaagcaaatgtctctaatggtgtttctaccgaagattggacatcccttactctcggaggtggtgctggcggtagtaatggcgatgcttccactcaaaatggattgaattctagacaccaagtcccatccagagacaatggcacaaatactttggctgattctgcttctttgcttcttggtatgaatgatgtaagatctgacagagcaagtagaccaaggtcaggtagtcctttcacatttcctcgccaaaaacgttctgtaaggccccgcttgtacctttctattgattcggaatcggaataa

SEQ ID NO: 376 - protein, 882 aa, Medicago truncatula
MDLVAGIKEKLTYFRIKELKDVLTQLGLSKQGKKQDLVDRILSILSDEQVSKIWAKKNAVGKEQVAKLVDDTYRKMQISGATDLASKGQVVSDSSNVKVKAEVEDSFQIQTTTTTKIRCLCGSTLETGDLIKCDDARCQVWQHISCVIIPEKPMEGIPPVPDKFYCELCRLSRADPFWVSVSHPLLPVKLATTSIPTDGTNPVQCVERTFQLTRADKDMVSKQEFDVEAWCMLLNDKVPFRIQWPQYTDLAVNGLPIRTTTRPGSQLLGANGRDDGPIITPHTKDGINKISLTVCDARIFCLGVRIVRRRSLQQILNLIPKESDGEPFEDALARVCRCVGGGNAADNADSDSDLEVVSDTFSISLRCPMSGSRMKIAGRFKPCIHMGCFDLDVFVEMNQRSRKWQCPICLKNYALENIIIDPYFNRITSMMINCGEDVTEVEVKPDGSWRVKAKSESERLDLGILGQWHLPNGSLCTSTAGDIKRVETLKQVKQEGFSDGPAGLKLGIRRNRNGNWEVSKPETTNTSSGHILKEVFGNPEQVVIPMSSSGSESGRDGDDPSVNQGGGGHIDYSTTNGIEMDSQSRNNVDLARGYTVHNTSAQVGGAEIIVLSDSEEDNDILVSPPIANNNHQNDTADGYSMPPPGIVDPYVEDQNLGGSSCLGLFPNEDDFGISSLWSLPSASQAGPGFQLFGSDADASDALVHLQHVPINCTSSLNGYALAPETALGSGSLLQDSSAGRSDADLNGGLVDNPLAFAGDDPSLQIFLPTRPAESSMQNELRDQANVSNGVSTEDWTSLTLGGGAGGSNGDASTQNGLNSRHQVPSRDNGTNTLADSASLLLGMNDVRSDRASRPRSGSPFTFPRQKRSVRPRLYLSIDSESE

SEQ ID NO: 377 - DNA, 2628 bp, Medicago truncatula
atggcggacctggtttccagctgcaaggataaactggcatactttagaataaaggaactcaaagatatattaaatcagctcggcttaccaaagcaaggaaagaagcaggatcttattgatagggtgttggcactcttaacagatgagcaaggtcaaaggcatcatggatggggaaggaaaaattctctcaccaaggaggcagtggcaaaaattgttgatgatacatacaggaaaatgcaaatccaatgtgctcctgatctagccaccaggagccacagcggatcagatttcagtttcaggcctatagaggaagcctatgactctttccagccagaggccaaagttcgctgcatttgcagtagcacaatggttaatgacagcatgatccagtgtgaagatcagcgatgccaagtgtggcaacatttgaattgtgtactcattccagataagcctggggagagcgctgaagttccacccgttttctactgtgaattatgccgactgagtcgggcagacccattttgggtcactgctggaaatccattactcccagtgaaattcgtgtcatctggtgttacaaatgatggaacaagtgtacctcaaagtgtggagaaaagcttccagctttctcgatcagatagagaaactgtccagagacaagaatatgacctccaggtttggtgcatgcttttgaatgacaaagttcagttcaggatgcagtggccccaatatgcagaattgcatgttaatggtatttctgtacgagtagtgactagacctggttctcaattactagggataaatggacgggatgatggtccactgataaccacatgcagtagagagggaattaataaaatttgcttatcaagggtcgatgctcggacattttgctttggtgttcgaattgctaaacggaggactgttgctcaggttttgaacttagttccaaaggaagctgaaggagagtcttttgagcatgctcttgctcgtgttcggcgctgtctcggaggtggagacactgcagagaatgctgatagtgacagtgatttggaagtggttgcggagtctgttacagtcaaccttcgttgccctaatagtggatccagaatgaggattgctgggagattcaagccttgcattcacatgggttgttttgatcttgaaactttcgtggaattgaatcaacggtcccgcaagtggcaatgtccaatatgtttaaagaattactctcttgagagcttgatgattgatccttacttcaataggattacttctctgttgcgcaattgcaatgaggatgtcaatgaggttgatgttaagcctgacggatcttggcgtgtgaagggtgatgctgcaagtagagaattatctcagtggcatatgcctgatggtaccctttgtaatcctaaggaagatgtcaaacctgccatgcaaaatggaaatgaacaaatgatggaaggtacttctgatggacagaaatctttgaaaattggaataaagagaaatccaaatggaatctgggaagttagtagcaaagcagatgacaagaagccttctgtggttggaaatcgcatgcaaaacaatagtgggttccgagctctaaacaacattatgcatatgagcaatagcccaactagtagttatagagacggggaagacccaagtgtgaaccaagagagcaataggcatgttgacttatcattgaacaatggtaataatgagtttgacagtttctctctcaattttggccaagcatgcaatacagatgatagaccacagcaacaacataatgccacagacgtcattgttcttagtgattctgatgaagagaatgatgctatggtttgtccaccagctgtctatgacaatactaccactgcaaatggtagtggttttcctttcaccactaatggtattggatatactgaaaggtaccaggaagatgccggcgttggtacaagtggccttggtttattgagtaacaatgttgatgattttgagatgaataactggcaaatgcattcttcttatcaacaacctgaacaaggcttccagttttttgggaatgatactgatgtccataatacttttgttggttcacacaattcctttggcttagcaccaaatgactattctcttgattgtaatgttggcgtagaggaggcttcggtaactcctgctctttcagtctgccggaatagtaatgaaatgcatggaagtttggttgataacccactggctttggttggcgatgatccatccttgcaaatttttcttccaagtcaaccttcctctgttcctcttcaggaagaacttagcgagcgtgctaatgcaccaaatggggttcagtctgatgattggatatcccttacactcgcagcgggtggaggtggtaacgaagagcctgcacctgctgatgtcaattcacagccacaaattccatcaacagagacagggatcgaaccattgaccgatgctgcttctgcatttctgagcacaaacattgaaagacgtagcggagctgatttaaatccaagaaggatagaaaatatattttctcatcctcgccagcctcggtctgttaggcctcgactctgtttatcaatagatactgattctgagtag

SEQ ID NO: 378 - protein, 875 aa, Medicago truncatula
MADLVSSCKDKLAYFRIKELKDILNQLGLPKQGKKQDLIDRVLALLTDEQGQRHHGWGRKNSLTKEAVAKIVDDTYRKMQIQCAPDLATRSHSGSDFSFRPIEEAYDSFQPEAKVRCICSSTMVNDSMIQCEDQRCQVWQHLNCVLIPDKPGESAEVPPVFYCELCRLSRADPFWVTAGNPLLPVKFVSSGVTNDGTSVPQSVEKSFQLSRSDRETVQRQEYDLQVWCMLLNDKVQFRMQWPQYAELHVNGISVRVVTRPGSQLLGINGRDDGPLITTCSREGINKICLSRVDARTFCFGVRIAKRRTVAQVLNLVPKEAEGESFEHALARVRRCLGGGDTAENADSDSDLEVVAESVTVNLRCPNSGSRMRIAGRFKPCIHMGCFDLETFVELNQRSRKWQCPICLKNYSLESLMIDPYFNRITSLLRNCNEDVNEVDVKPDGSWRVKGDAASRELSQWHMPDGTLCNPKEDVKPAMQNGNEQMMEGTSDGQKSLKIGIKRNPNGIWEVSSKADDKKPSVVGNRMQNNSGFRALNNIMHMSNSPTSSYRDGEDPSVNQESNRHVDLSLNNGNNEFDSFSLNFGQACNTDDRPQQQHNATDVIVLSDSDEENDAMVCPPAVYDNTTTANGSGFPFTTNGIGYTERYQEDAGVGTSGLGLLSNNVDDFEMNNWQMHSSYQQPEQGFQFFGNDTDVHNTFVGSHNSFGLAPNDYSLDCNVGVEEASVTPALSVCRNSNEMHGSLVDNPLALVGDDPSLQIFLPSQPSSVPLQEELSERANAPNGVQSDDWISLTLAAGGGGNEEPAPADVNSQPQIPSTETGIEPLTDAASAFLSTNIERRSGADLNPRRIENIFSHPRQPRSVRPRLCLSIDTDSE

SEQ ID NO: 379 - DNA, 2442 bp, Medicago truncatula
atggcgctcgaccccgccgacgatccgctgctcgccgattgcaagtacaagttgaatcactttagaataaaagagctaaaggatgtcctgcatcagcttggacttccaaagcaaggaaggaaacaggaacttgtggacaaaattatagcagtattgtctgatcaacaagaacaagactccagattgaatggcttgccaaacaaaaagatggttgggaaagaaactgtggctaaaatagttgatgacacttttgcaaaaatgaatggctccacaaatgctgttccagcctctagaaatcagactgactcggggcacattgtaaagcctaaaaggaagtcagatgattctgctcagttggatgtcaaagtccgttgtccctgtggttattccatggccaatgattccatgattaagtgtgaaggtccacaatgcaatacacagcaacatgtaggctgcgttatcatatctgagaagcctgcagacagtgttcctccagaattaccaccacacttttattgtgatatgtgccgaatcactcgagctgaccctttctgggttactgttaatcatcctgtacttccagtctcaataactccctgtaaagtagcatctgatgggtcatatgctgtacagtatttcgagaagacctttccgctatcaagagctaattgggagatgcttcagaaagatgaatatgacctccaggtttggtgtatcctattcaatgatagcgtacctttcaggatgcagtggcctttacattctgatattcaaattaatggtattcctattagggttgtcaacaggcaacccacacaacagttaggggtgaatggtagagacgatggtccagttttaacagcatatgtgagagaagggtctaataagattgtcctatctagaagtgactctcgcacattctgtttgggagtcaggattgccaagaggagatctgtagaacaggtcctatctttggtgccaaaggaacaagatggtgagaactttgataatgcccttgctcgtgtgcgtcgctgtgttggtggtggaaccgaggcagataatgctgacagtgacagtgatattgaagttgtagctgattctgtctctgtgaatctccgatgccctatgactggttcaaggatcaagatagctggccggttcaaaccctgcgttcacatgggttgttttgatttagaagcttttgtggaacttaatcaacgttcaagaaagtggcagtgcccaatttgcctgaaaaactactctttggacaacataatcattgatccttacttcaaccgcataactgctttggtccaaagttgtggagatgatgtatctgaaattgatgtcaagcctgacggttcctggagagtcaagggtggagcagaactgaagggtcttgcacagtggcatttacctgatggcactctctgtatgcctacagatacaaggtccaagcccaacataagaattgtaaagcaagagattaaagaagaaccgttgtctgaagaaacaggtggccgtcttaagttgggaatcagaagaaacaacaatggccagtgggaaattaacaagagattggattctaacaatggtcagaatggatatattgaagatgaaaactgtgttgtttcagcaagcaacactgatgatgagaacagcaaaaatggaatctataatccagaaccagggcaattcgatcaactaaccagcaatatctatgatcttgattcttctcctatggatgcacattttcctccagcaccaacagagcaggatgtaatagttctgagtgactcagatgatgataatgttatggtgttatcacctggtgatgttaatttcagttcagcacatgacaatgggaatgcattcccacccaacccacctgaagcttcaggaatttgtggggaacaacctagaggagccggcccagatgtgacttcatttcttgacggtttcgatgatctggaactgccattttgggaatcttcgagctctcaagatgctgcaggcacacaggtgacagacaatcaatgcgaaatgcaaaatttcattgtcaaccatcaatttttgcacgagccaattttaggggttaacttgggtggaacagcagcatcaaacacactggaatgtgagcatgatggtgcgttacaagcttgtcagtcgagtgatcaagatggtgatcagaatcaaacatgccatgatgggcactccggggatttgacaaatcttagtatcattagcactcaagatagtttaactaatggcaaaaatgcttctcagaaaaggacaaactgtgaagatggcacggcaggtttagacggctcagttgtcaggagcgcgaatggcttgagaggagagatgccaccacttgggcaggagcaggatcgtacagttagacaaaagttgatattaacaatcgagtcagactctgattag

SEQ ID NO: 380 - protein, 813 aa, Medicago truncatula
MALDPADDPLLADCKYKLNHFRIKELKDVLHQLGLPKQGRKQELVDKIIAVLSDQQEQDSRLNGLPNKKMVGKETVAKIVDDTFAKMNGSTNAVPASRNQTDSGHIVKPKRKSDDSAQLDVKVRCPCGYSMANDSMIKCEGPQCNTQQHVGCVIISEKPADSVPPELPPHFYCDMCRITRADPFWVTVNHPVLPVSITPCKVASDGSYAVQYFEKTFPLSRANWEMLQKDEYDLQVWCILFNDSVPFRMQWPLHSDIQINGIPIRVVNRQPTQQLGVNGRDDGPVLTAYVREGSNKIVLSRSDSRTFCLGVRIAKRRSVEQVLSLVPKEQDGENFDNALARVRRCVGGGTEADNADSDSDIEVVADSVSVNLRCPMTGSRIKIAGRFKPCVHMGCFDLEAFVELNQRSRKWQCPICLKNYSLDNIIIDPYFNRITALVQSCGDDVSEIDVKPDGSWRVKGGAELKGLAQWHLPDGTLCMPTDTRSKPNIRIVKQEIKEEPLSEETGGRLKLGIRRNNNGQWEINKRLDSNNGQNGYIEDENCVVSASNTDDENSKNGIYNPEPGQFDQLTSNIYDLDSSPMDAHFPPAPTEQDVIVLSDSDDDNVMVLSPGDVNFSSAHDNGNAFPPNPPEASGICGEQPRGAGPDVTSFLDGFDDLELPFWESSSSQDAAGTQVTDNQCEMQNFIVNHQFLHEPILGVNLGGTAASNTLECEHDGALQACQSSDQDGDQNQTCHDGHSGDLTNLSIISTQDSLTNGKNASQKRTNCEDGTAGLDGSVVRSANGLRGEMPPLGQEQDRTVRQKLILTIESDSD

SEQ ID NO: 381 - DNA, 2835 bp, Physcomitrella patens
atggcagatattgctactcgctgtcggatccagttaagttcctttcaaattaagcatctcaaggacactctcacacgattaggcctttctaaacgagggaccaagccgctcattatgcctcatttctgcaatgtgaaatggttaaaaattcacgtggtagcacttcgacctctgtactcatctctccaccttgatgtaagcaagtttgatggggtcatgttgatggacaagatcatgggtttgattaaccctgcagagaagcaaccaactaaaggcttgaaatacagcaagcaaattgtttcaagggaagaagccattgctatcatcgaagaggaatacaggaagcttagacattctagaagcgaatctaagcgtaaagctgctaagtctggcttcggcagcaagcatccatcagcaggacttgaagagcttacatgtgtggaagaggctaaaactcggtgtccttgtgggaacaacacagagactggaacaatgatccagtgtgttaatcttaaatgtcgggtttggcaacacatgagttgtgttgtcattcctgaaaagtcaggagatggaactcagacaggaattccttcaaacttttactgcgaactgtgccgcatatcgcgtagcgatcccttctgcgaagcacagttacagacgctaatgccttcaaagctgattccttctggagccaatacagaaggatctaatattgtacagacgttagagaaatcattttatttaagtcgatctgaccgagaacttctccaaaaaccaaatcatgatctgcaggtctggtgtgtactcttgagtgataatgtctcctttcgcatgcactggccttcctttgctgatttacgagtaaatggaataggcgtgcgtgttactaatcgcactggccagcaactcctaggagcaaatggtcgggacgagggaactagtgtcactgtgtgtgctagggaggggcttaacaggctgaatatttcaacttatgatgcccgctccttttgtttaggtgtgcgaattatccgccgcctttctctggagcagattatggaatcgattccgaatgagaaggatggggagaagctagaagaagcaatggctcgagttcggcgttgcatcaatggagggggtagtcaagggttgggggccgatgatgacagtgacagtgatttggaagttgtggcagattttattactgtcaacctacgatgcccgatgagtggttctcgtattaaggttgccggccgttttaaaccatgccttcacatgggctgcttcgatcttgatacctttgtggaactcaaccagcaagcacggaagtggcaatgtccaatttgtctgaagaactattgcatagataacctgataattgaccctttttttaatcggattactaatgcggtaaattgtttgcatgaggacattgctgcagtggagctcaagtctgatggtttttggcggcccaaactagaaggcagagtcagaagtagagaaccatggcgtccgtctccagtcgtaacaaacgttgtgaatgaaaccacatctgtacctgttttattttctgagaatgtcagaacagaagaaaagttgtcttcccatgacaacggctcttcgtgcttcaatcgaaatccttgtggcgttttggtgctgcattgcactgagaatttgaatggtggtcatagtcaagaagttatcaacgtttctagactttcaagaagtaatagtatcacagacggcaatcttagaggagatgaggatgaacacagtgcaaaccaagatcgaggtgctgtttctactgttgacggtgacaatgttgggttgtcttcaagatctccgcagccaactagcaaaacgctgcaaacttgtgctgatcttgcaaatggagctcaagtaattgtactcagcgatagtgaggatgaaggagaagacgaagagactattgttgtgtcatcttgtgcatcaatttatgtggaatccaacgttgttggcaattggagaatgcgttccaggaagagctatcaaacaaatggtgattcatcagggctcgctgttggtctagaatatgccgatgtcactcctgccagccactcagtttgtcatccatctgatcctgcgacgagcaggagaattgacattgttatcaatgaacagatgactgacgacagtggattaggcttgcatttagacagcggcagcttaagcgcagtacccgcagagatagctagaaacggggagtgtggtgtccatgaaagtcaaacagaggtggtaaatgtgctgcagggtcagcctgtgcggcaaacaccggttcgatttgtagctggttgtgggtcttcgtttagacctcttgacaaagacgatacgacgtcaccatcgggatgggaaagcctttgtctccctaatggagccacagacacagatggcggtagtatggataatgagggaactggtttgcctctgcaaaagtttttgccatcccaaccagttcgagttgaggtattggtggcggaaaagaaccatgcattagaagaagccacgcacaggactttgttgctgcagctaacctgtacctcttgaaacggtaaaccaattcatttactctgcattgtacagtgatagcatttgtttgcaaacctatgcatccattttgtgcattaatgcgatatcctctagacttttatatgtgattattaaggcatttcaccacatttttaatggcaaccatcatgcatagaatcagtgactaacagtattgcagcatcaagtaaatttacaagaacctttcctccaaactgatgaaatttaccacctttggtgttcccttatcctggg

SEQ ID NO: 382 - protein, 859 aa, Physcomitrella patens
MADIATRCRIQLSSFQIKHLKDTLTRLGLSKRGTKPLIMPHFCNVKWLKIHVVALRPLYSSLHLDVSKFDGVMLMDKIMGLINPAEKQPTKGLKYSKQIVSREEAIAIIEEEYRKLRHSRSESKRKAAKSGFGSKHPSAGLEELTCVEEAKTRCPCGNNTETGTMIQCVNLKCRVWQHMSCVVIPEKSGDGTQTGIPSNFYCELCRISRSDPFCEAQLQTLMPSKLIPSGANTEGSNIVQTLEKSFYLSRSDRELLQKPNHDLQVWCVLLSDNVSFRMHWPSFADLRVNGIGVRVTNRTGQQLLGANGRDEGTSVTVCAREGLNRLNISTYDARSFCLGVRIIRRLSLEQIMESIPNEKDGEKLEEAMARVRRCINGGGSQGLGADDDSDSDLEVVADFITVNLRCPMSGSRIKVAGRFKPCLHMGCFDLDTFVELNQQARKWQCPICLKNYCIDNLIIDPFFNRITNAVNCLHEDIAAVELKSDGFWRPKLEGRVRSREPWRPSPVVTNVVNETTSVPVLFSENVRTEEKLSSHDNGSSCFNRNPCGVLVLHCTENLNGGHSQEVINVSRLSRSNSITDGNLRGDEDEHSANQDRGAVSTVDGDNVGLSSRSPQPTSKTLQTCADLANGAQVIVLSDSEDEGEDEETIVVSSCASIYVESNVVGNWRMRSRKSYQTNGDSSGLAVGLEYADVTPASHSVCHPSDPATSRRIDIVINEQMTDDSGLGLHLDSGSLSAVPAEIARNGECGVHESQTEVVNVLQGQPVRQTPVRFVAGCGSSFRPLDKDDTTSPSGWESLCLPNGATDTDGGSMDNEGTGLPLQKFLPSQPVRVEVLVAEKNHALEEATHRTLLLQLTCTS

SEQ ID NO: 383 - DNA, 3807 bp, Physcomitrella patens
atggacacacttaaagtaacagaaatattttcatccatctatcaatccattgattcatccaaacatacatccatccattcatatattcattcatggggagagagtgagaaatgcattgatggtggaggagggtattcatggatgtggggtacttcccattcccatgaaggatcattttgtaatcaccatacaaattctaggacacaattcatgaggtggaggagaaaagacttggtaacgaacgaacctgttcttcaacttcacccccttctacagcctggcacgctctcgccttgtgaacgccagagagaacacactaaacttattgagaatgttccgggaacaccgagagcgcagtgggaacgtcggatcatgcggacgtttgaagctctccatgggatgggccgtggcctggccatttctccaaggctcatgctcgtgtggattctcttcattttgtggggtcctgtgtcgagcggtgattgtgggagtagcgggtctggggttcattgtggtgccctagcagcaggggagaggagtttctgggagtatgctcctggattgctggatgtgctcgagggtttagttggaagcattcggcgacatgcgctatgttgtgatgccaacttcaacgagattgaatttgcgccaatcatcctgctagttacacagaggaacaggaagtcattgcctgtttgcaaccagagctttacgaatttacatccgcactgtagaattgcaattttcttgctgttagcaatggcagacgtggccactcgatgtcggagccagctgggatcctttcgaatcagggaactgaaagatgtcctgtcacgattagggcttcccaaacaagggaagaagcagattctgatggacaagattatgggtttgattaatcctgcagacaaacaatcgctaactaaaggatcgaaaagcagcaagaaagttgtttcaagggaagaagctattgccatcatcgacgagcagtacagaaagcttagacattccggaaccgagtctaagcataaagttgctaaatctggatcgagtagcggttatccatcagcaggccctgaagatcatgaagttgtagaagagactagaactcgttgtccttgtggaagtaatgtggaaactggaacaatgattcagtgtgataataataaatgtaagatctggcaacacatggactgtgttgtaattcctgagaagccatcggatggaactcagccagaaatcccgtcaagtttttactgcgagctctgccgcatagcacgtggtgatccgttctgtgaagcccaaactcataccctaatgcctacaaagctactttcctccacggccaaaacagaagggtccaacactctacagactatagaaaagtctttttttttaagtcgagccgaccgggaacttcttcagaaactaaattatgatttgcaggtgtggtgtgtgctattgagtgataaagtctcctttcgcatgcattggccttcctatgctgatcttcgagttaacggaataagtgtgcgggttacgaatcgacctggccagcaactcttaggagcaaatggccgcgacgaaggacctggtatcactgtatgtgccagggaaggaatgaacaggctgaacatgtcagcctatgatgcccgccccttctgtctgggggtgcgaattatccgccgcctcaccctggagcaggttaaagaccttattcctaatgagaaggatggggagccgtttgaggaggctatggctcgagttcggcgatgcatcaatggagggggtggtcaaggtttggggggcaatgatgacagtgacagtgatttggaagttgtagcagaatcaatcactgtgaacttacgctgtccgatgagtggatctcgaatcaaggttgctggccgttttaagccatgtctccacatgggctgctttgaccttgatacatgtgtggaactcaatcagcgagcacggaagtggcaatgcccgatttgtctgaagaactattcaatagagaatctgatcatcgaccctttttttaatcagattacaaatgcggtgagaactatggatgaggacataaccgaggtggagctgaaggctgatggttcttggcgtcccaaactggaaggccatgccaaaaatggcgaatcttggcgtccacctccagtcgctgttggagcaaatattcacaaagctacggctgcacctgttttattcttcaagcatgtcaaaactgaagaggggatgtcttctcatgacaacgggttttcccgattcaaagtaaatccttctggtgattgggctcggaatgccacgaagcatctgaatgatggcccgagtcaaaaagttgttgacgcacccagactttcaagaagtagcagtgccactgacagtaatcttaaaattgacgaggatgagcacagtgtgaatcatgatccgagtgagaagaatgctgtttcaatggatgataatgaggaagttgagtacttggcaagaccacgggatgcacctggcggaacgtggcaaaccagtggcgatgatcctgcaaatggagccgatgtaattgttcttagtgattctgatgatgatggaggagaggaagaagatgttgtggcatcttctgctgcatcaatgtatgcagaatctgacgttggcaataggagaatgcgttctcgagaggttagtcatacgaatggtgattcatcagggcttgcccttggtttagaaagtacggatgtcactcttgcaagcaactcagtctgtaacccattcgaccctcccctgagcactagagttggtgtcggtgtctccgatgaagggacgagcaacaacagtggatttggcttgcagtccgacagaaatagtttttgggtatccgccgagaagaccagaaatgggcagtatagtttttatgcccctcgaacagagtctgttaatgtactgcaacatcctcctcctgtgcggccgacaccggtgcaagccctagctggtcctgggtttttgtccgtacctctcgttagggatgatgcgtcattggcatcgggatggaaaaggtatagtcggccttatggagccacaggcacagatggcggtagtgtggacagcgacacagatgcttcgcctctgcaaaattttctgccatctcaaccagcacgagctgaggttcaagacaatctacgagggccatttctccccgaagctgatgatattgataactcttggttttccctcagtcttggcggaggagaaaacttggcagaaccatctccagcacgaagtaatttacgcactagcttagaacagcgatcaccaatccctcaacctagagtcactgcacacgatgacactcatggtagatcaggacgtctgggtaagcatggttcgtcccagcgcctaatggactcacgacccccagtgcgcagtcattttaccgcagacggccatccttttccacgtcatctgtcttcgttccgaagagacggctgtttgctcagttgttcagtgaggcacagttatgttacaactcagaatggacatccacaactggcggcttctgcgttccacaatgcccgggtggtcctcttctgtcaggatttgatggggcttacacgaaagaatttcaatggtgcaagatcacgcaaacgcctgcaacctgttttcagggttgtacccctagtgctggcaagaacgacaattcagaaaggagcagagatacaaactggtgattgtatgctgaatctaggatgggcagtatttgttaagctgcattcacctgaaggatttgggttgtctggagattga

SEQ ID NO: 384 - protein, 1268 aa, Physcomitrella patens
MDTLKVTEIFSSIYQSIDSSKHTSIHSYIHSWGESEKCIDGGGGYSWMWGTSHSHEGSFCNHHTNSRTQFMRWRRKDLVTNEPVLQLHPLLQPGTLSPCERQREHTKLIENVPGTPRAQWERRIMRTFEALHGMGRGLAISPRLMLVWILFILWGPVSSGDCGSSGSGVHCGALAAGERSFWEYAPGLLDVLEGLVGSIRRHALCCDANFNEIEFAPIILLVTQRNRKSLPVCNQSFTNLHPHCRIAIFLLLAMADVATRCRSQLGSFRIRELKDVLSRLGLPKQGKKQILMDKIMGLINPADKQSLTKGSKSSKKVVSREEAIAIIDEQYRKLRHSGTESKHKVAKSGSSSGYPSAGPEDHEVVEETRTRCPCGSNVETGTMIQCDNNKCKIWQHMDCVVIPEKPSDGTQPEIPSSFYCELCRIARGDPFCEAQTHTLMPTKLLSSTAKTEGSNTLQTIEKSFFLSRADRELLQKLNYDLQVWCVLLSDKVSFRMHWPSYADLRVNGISVRVTNRPGQQLLGANGRDEGPGITVCAREGMNRLNMSAYDARPFCLGVRIIRRLTLEQVKDLIPNEKDGEPFEEAMARVRRCINGGGGQGLGGNDDSDSDLEVVAESITVNLRCPMSGSRIKVAGRFKPCLHMGCFDLDTCVELNQRARKWQCPICLKNYSIENLIIDPFFNQITNAVRTMDEDITEVELKADGSWRPKLEGHAKNGESWRPPPVAVGANIHKATAAPVLFFKHVKTEEGMSSHDNGFSRFKVNPSGDWARNATKHLNDGPSQKVVDAPRLSRSSSATDSNLKIDEDEHSVNHDPSEKNAVSMDDNEEVEYLARPRDAPGGTWQTSGDDPANGADVIVLSDSDDDGGEEEDVVASSAASMYAESDVGNRRMRSREVSHTNGDSSGLALGLESTDVTLASNSVCNPFDPPLSTRVGVGVSDEGTSNNSGFGLQSDRNSFWVSAEKTRNGQYSFYAPRTESVNVLQHPPPVRPTPVQALAGPGFLSVPLVRDDASLASGWKRYSRPYGATGTDGGSVDSDTDASPLQNFLPSQPARAEVQDNLRGPFLPEADDIDNSWFSLSLGGGENLAEPSPARSNLRTSLEQRSPIPQPRVTAHDDTHGRSGRLGKHGSSQRLMDSRPPVRSHFTADGHPFPRHLSSFRRDGCLLSCSVRHSYVTTQNGHPQLAASAFHNARVVLFCQDLMGLTRKNFNGARSRKRLQPVFRVVPLVLARTTIQKGAEIQTGDCMLNLGWAVFVKLHSPEGFGLSGD

SEQ ID NO: 385 - DNA, 3036 bp, Physcomitrella patens
atggcggacgtagcgtctcgctgtcagagccagttgggctcatttcgcatcagggaactgaaagatgtcctggcgcgactgggtcttcctaaacaaggaaagaagcagatcctcattgacaagatcatggatttgatcaatcctgcagagaaggaatcgctagcgaaaggaattggtttgtttatccttgagcttgaacttgcgatctatgttgctttagcaggctctaaaagtagcaaaaaagccatttcaggagatgaagcaattgctattgttgacgagcaatacagcgtctttcggagatttgtcatgaaggtctatattcagcagttgttcttgcgagaatcacgagtagttaccttgagtggaaacattttggagctctttcaaggaaacatagtgacgaatacttcccaaagatcaacgaaacttcgaagtattggaactgatttatctaggcataaatctgctaagtctgcatccagcagtggatatccttcacctgggcttgatgaaagtcgttgtccttgtggaagtagcgtggaagctggacgcatgattcagtgtgatagtcatggatgtcggatctggcaacataggagttgcgtcgattttcccaagaagccaaaagatggagttccagttgagactccgccaaatttctactgcgagctttgccgcatatctcagggagatccattttgtgaagcactttttcaccctctgctgcctgtaaagtttccttcttccacagccaaatcggagagagctattactctacagagcatagatgagcagtttactttgagtcttgcgcaccaggaactgcttcagagtccaaattacgatctgcaggtctggtgtgtgctcttgagtgacaaggtttcctttcgcatgcactggcctctttcagctgttttacgtgttaatgatgcaaatgtgcgggttactaatcgacctgctgaacaacctttaggcgcaaatagtcgagatgaaggacatagtatcacttcatataccagagagggactgaacaggctgaacatgtcatgtgatgatgctcgcccattctgtttaggagtgcgaatcatccgccgccgttcccttgaggaggttatggacatgattccaaatgagaaggatggagagccttttgacgaggccgtagctcgagtacggcgatgtataaatggagggggtggtcagggattaggcagtgatgatgacggtgccgatagcgatttggaaattgtggcggagtctctcactgttaacttgcgctgcccgatgagtgggtcccaaatcaaagttgcaggtcgttttaagccatgcccacacatgggttgctttgatcttgatacatatgtggaaatgaatcagcgaacgcggaagtggcaatgtcctatttgtttgaagaactactctatagaacatctgatcatcgacccttttttcaatcggattacaaatgcgttgagaactctggatgaagacgtcactgaggtggagctcaaagctgatggctcgtggcggcccaaactggaagggaatgttaagaacggagagccttggagtccatcaccagcggctgccgtagcaattgtctctaatgggaacaaatcagcacctgttctattttctagccatcatgtcaaaattgaggcgggccgttcttctcatgatcatggctctttgcaattgaaatggacacctgaagttcagagagtcgtgaatggcaggaattaccgaaatggtggcccaagcctgcaagttatgcccttgcccagactttcaagaagtagcagcgcgactggtagcaatcttaaagtaggcgaggatgaaaatagtgtaaatcaagatgcaagtgagaaaaacactgtatccatggatgacaccgatgtggaattcttatcaatacttcaggaagcagctagaggaacgtggcaagccagtggtgatgatcctgcgaatggaggtgatataatagttctcagtgattcagatgatggagaagatgaagtaacagttgtcgggtcttctcatgtttcgatgtactcggacgtcatcggcaatggaggagttcgtttctcagagggtagggtacccaatgatataaatggtgatccatcacggtttgcccttggtttagggcaatatgagtactatgggtcacaaacagaggcggttgcgctgcaacatcctcctttgcaaccaacaccagtggaagttgtaggaagttccgatttcctgtgcacttctttgatcgggaatgatccatcgcaattagactgggaaagttttgggcagtcacatacccccacactttatgaagttattgatagcgagagtatagacattaacaaagatggttcgcctttgcaaaatcttctcccatcccaaccagctcgatctgaggtccaagaaaatttacgggacctaacactccctgcagaagttatggacaactcttggttttcacttagccttggcgggataggaaatgtggtaaaaccaactccagaacgaagtttatttactacttcaatagaatggtgttcgccaatttctcaaccaggagtcaatgaatacgatcctcatggtctgggtagcaatggatcatcccaacacctaatggactcaagacatccattgcgcggtcattttaccgcagacggttatccttttccagtaaggccctgcagtggccacattcatgcacggagagtttcccgttaagttcggatggataattcgaagtagcttagaggttcctactttcgtctgttagcagggcgtgtcaagattgggcaaattgcttctcgatttccctccgacatcgatccttccatgcagcagctgttgtactataacgaagcagagctattctgatgggaatgaaaggaatataatggacatccgggtcaggcggatttgctggacatcatttccagtttctgctctacttccgctctgttgtcggtacctaattttctcgcagtaacttttgtacacgataatttctttattattaacaaa

SEQ ID NO: 386 - protein, 911 aa, Physcomitrella patens
MADVASRCQSQLGSFRIRELKDVLARLGLPKQGKKQILIDKIMDLINPAEKESLAKGIGLFILELELAIYVALAGSKSSKKAISGDEAIAIVDEQYSVFRRFVMKVYIQQLFLRESRVVTLSGNILELFQGNIVTNTSQRSTKLRSIGTDLSRHKSAKSASSSGYPSPGLDESRCPCGSSVEAGRMIQCDSHGCRIWQHRSCVDFPKKPKDGVPVETPPNFYCELCRISQGDPFCEALFHPLLPVKFPSSTAKSERAITLQSIDEQFTLSLAHQELLQSPNYDLQVWCVLLSDKVSFRMHWPLSAVLRVNDANVRVTNRPAEQPLGANSRDEGHSITSYTREGLNRLNMSCDDARPFCLGVRIIRRRSLEEVMDMIPNEKDGEPFDEAVARVRRCINGGGGQGLGSDDDGADSDLEIVAESLTVNLRCPMSGSQIKVAGRFKPCPHMGCFDLDTYVEMNQRTRKWQCPICLKNYSIEHLIIDPFFNRITNALRTLDEDVTEVELKADGSWRPKLEGNVKNGEPWSPSPAAAVAIVSNGNKSAPVLFSSHHVKIEAGRSSHDHGSLQLKWTPEVQRVVNGRNYRNGGPSLQVMPLPRLSRSSSATGSNLKVGEDENSVNQDASEKNTVSMDDTDVEFLSILQEAARGTWQASGDDPANGGDIIVLSDSDDGEDEVTVVGSSHVSMYSDVIGNGGVRFSEGRVPNDINGDPSRFALGLGQYEYYGSQTEAVALQHPPLQPTPVEVVGSSDFLCTSLIGNDPSQLDWESFGQSHTPTLYEVIDSESIDINKDGSPLQNLLPSQPARSEVQENLRDLTLPAEVMDNSWFSLSLGGIGNVVKPTPERSLFTTSIEWCSPISQPGVNEYDPHGLGSNGSSQHLMDSRHPLRGHFTADGYPFPVRPCSGHIHARRVSR

SEQ ID NO: 387 - DNA, 2582 bp, Populus trichocarpa
tgtttttaatagttttttgtgctaatggagatggattcgatggctagctgcaaggaaaagttggcatattttagaattaaagagcttaaggatattttatctctgttgggtctttcaaagcaagggaagaagcaggatctaatggacagagttataggtttgctctcggacgatgaaatttgctctgctcgccgcttagcaaggaaaaagcagattggaaaggaagctgtagtgaaaataattgatgatgcttacagaaaaatgcagataatggatgcatcagatttagcagccaaggctccaagtggcttagatattacgagtgtcacagaagaagttgaagatttcattactccggggaagacgattcgttgtccttgtggaagttcgctgcctaccgagttcatgatacagtgtatagattcaaaatgtcaagtacagcaacatattagttgtgtcatttttacagagatccctatggagagtgaacatccacctgtattttactgtgaaacatgtcgaattgaacgagcagatccgttctgggttactgtggcacatttattatttcctgtgaagttaccgagttcaaatatttcaatagatggtaataacacattgcagaatgtggaaacaacatttcagttgacaagatcagatcaacacctactaaagaattgtgaatatgacgctcaggcttggtgcatgcttctcaacgataaagttttgtttaggatgcagtggccactttatgcagatttacaggttaatggtatgcctgtgaaaacgcttaatagaccgggatcacaatctctgggtgccagtggccgtgatgatggtgccctaatcaaatcatgcattggagagggaatcaatagagtttctttatctggatgtgattctcgtgctttctgctttggcattagactcgtaaagcgacaaacagttgaacaggttctcaacctgattcctaaagatggtgagccttttgaagatgcacttgctcgtgtttgtcgttgcattggtggtgggatgggtgcctcaaacgaagatagtgatagcgatctggaggtgattgcagaagcaattatagttaatctccgctgtccttggcagtgtcccatttgtcttaagaactactccttggaggatattgtcattgatccttacttcaaccgcattacgacaatgatgggtcattgtgaagaagacataactgatattgaggtgaaacctgatggttcctggactgcaaagaccaaagttgagattggtgatcttgggcaatggcattttcccgatggttctctttgtgcttttatggatgaagttacttcctgttatgaaatctcaaggcagattgagaagggagatggcttgaaagcacatggtagtcctgaaatcggaattaagagtaatttcggtggaatgatgcaaggaagaaaacatcagcttgctttttgttcctcgaagaatcaaattgagggaaattttgtgaatcaagggcaaaggacaaaaacaatgagcagtagcatcactggaagtagcaaatacgaagaggacccaagtataaaccaggattacagtgggcatgttgaaatatctcccagtaatgtcaatgagatcaactctatttgtcattattttgacccaacacttgcaataaacaatggtagttttgtgccatcaaggaatgctgacatcattgttcttagcgattctgatgaagagaatgtcaatttagttcctcctgaaaccgtctatgatacttgcccagtagatgggagttgttcttcattggttgccaatcctggaatagcagactcatacttggaagatctagcacttgatgcaggtgctgattcttgttttgatctcttcgatacaggtgtgaatgatgttgggatgtccagctggtccttttcttctggtattcaagctggtgcccatttccaactatttaatacggactcagatgtatcagatgcttttattgatctggagcattcttccatcagttgtgctgctccaatgaatggtagcacattggcatcaacgccaactataacttctggcggtgaagtcccagattctttggcctgtgttgccaatgttgatatggatgttggcttggttgataatccaatgagatttgttagtgaggacccctcattacaaacatttctcccaactcaacctgtgcagcctgacttggtaatccagcctcctgtatctaatcctgtccctactgaggattggatttcccttaggcttggcagcaccaatgagagttttggcagtcacaccatggatcgaccgcaccgtgctgccagagatggggtagatttgagaaaccagttaggattaaatcaagctacttcagttgcagctctaaatgatgaagctaggtctaatgggaaatataacaagaaaatttcagatggccctttctcatttcctcgccagccacggtcggtgagacaacgtgtttattctcaatagatgttgaccaacaagaagggcttggactttgtttgattcatctggaaggctaatagctgccaacacgattctccttattc

SEQ ID NO: 388 - protein, 825 aa, Populus trichocarpa
MEMDSMASCKEKLAYFRIKELKDILSLLGLSKQGKKQDLMDRVIGLLSDDEICSARRLARKKQIGKEAVVKIIDDAYRKMQIMDASDLAAKAPSGLDITSVTEEVEDFITPGKTIRCPCGSSLPTEFMIQCIDSKCQVQQHISCVIFTEIPMESEHPPVFYCETCRIERADPFWVTVAHLLFPVKLPSSNISIDGNNTLQNVETTFQLTRSDQHLLKNCEYDAQAWCMLLNDKVLFRMQWPLYADLQVNGMPVKTLNRPGSQSLGASGRDDGALIKSCIGEGINRVSLSGCDSRAFCFGIRLVKRQTVEQVLNLIPKDGEPFEDALARVCRCIGGGMGASNEDSDSDLEVIAEAIIVNLRCPWQCPICLKNYSLEDIVIDPYFNRITTMMGHCEEDITDIEVKPDGSWTAKTKVEIGDLGQWHFPDGSLCAFMDEVTSCYEISRQIEKGDGLKAHGSPEIGIKSNFGGMMQGRKHQLAFCSSKNQIEGNFVNQGQRTKTMSSSITGSSKYEEDPSINQDYSGHVEISPSNVNEINSICHYFDPTLAINNGSFVPSRNADIIVLSDSDEENVNLVPPETVYDTCPVDGSCSSLVANPGIADSYLEDLALDAGADSCFDLFDTGVNDVGMSSWSFSSGIQAGAHFQLFNTDSDVSDAFIDLEHSSISCAAPMNGSTLASTPTITSGGEVPDSLACVANVDMDVGLVDNPMRFVSEDPSLQTFLPTQPVQPDLVIQPPVSNPVPTEDWISLRLGSTNESFGSHTMDRPHRAARDGVDLRNQLGLNQATSVAALNDEARSNGKYNKKISDGPFSFPRQPRSVRQRVYSQ

SEQ ID NO: 389 - DNA, 1847 bp, Populus trichocarpa
ctctatatcctgtgaagctggttgctacaaatgttccaactgatggttcaagcccagcgcagggtgtggagaaaacatttcatctcactagagcagacaaggatctactggcaaaacaagaatatgatattcaggatgcaatggccgcagtatgcagatctccaggttaatggtattgctgttcgtgctattaatagacctggctcgcaattgctaggcgctaatggtcgtgatgatggtccaattatcacgtcatgtgcaaaagatggaatcaataagatatcattaaccggatgtgatgctcgaatcttctgcttaggagttagaattgtaaagcggcgaacagttcagcaggtgagcgttttgaagatgcacttgctcgtgtttgtcgctgcgttggtggtggaactgcaacagatgatgcctatagtgacagtgacagtgacctggaagttgttgcagattcttttggtgtcaatcttcgttgtcctgcattgcgtggaagatataacagagattgaggtgaagcctgatggttcctggcgagtgaaaacaaaaactgaatctgaccatagggatgctggagaacttgctcaatggcataatcctgatagcactctctgtgtcccttacactggagaactcaaatcaaaagtggaaatgaagcagatcaagcaggaaggtggttcagaaggtaatgctggtgctagtttgaaacttggaatcagaaagaatcgtaatgggttttgggaagtcagtaaacctgacgatatgaacacctcctcttcaggtagattgcaagaaaactttgaactctatgaacagaaagttattcctatgagcagcagtgctactggtagtggtcgtgatggggaagatccaagtgtaaatcaagatactggtgaaaattttgaattcacaaacaatggaatggagcttgattctttatcgttgaatgtatattcaacgtacggattcactgaccaaaatttatctgcaccagtagggaatgcagaagtcattgttcttagtgattcagatgaagaaaatgatatattaatgtcctctggatctgtctacaagagcaatcaaaatggtggtgctactatttctgtgccctctcctgaaattgcagatcattttctggaagatcctacacttgggactggtggaaattcttgcttgggtcttttcaatgctgatgaatatgggatgcccctctggccactacctcccggaaaccaagctggtccgggattccaattatttaattcagatgtctcagatgccttggttgatttaccgcatgatcctgttaactgtccctcttcaatgaatggctacacattagctccagaaactgtcatgagatctacttgtttaattccagattcttctattggtcgatcagacacggatgtaaatgatggtttggttgataatcccttggcttttggcagagaagatcccagtcttcaaatctttcttccaactgggccttcagatgcatcaatgcagtctgatatgagggatcaagctgatgtgtcaaatggtgtccgtactgatgattggatctctcttaggcttggtggtggtggtgctactggcaatcacagcgaggcagttccttcaacaaatagactgaattcaaggcagcagatgccatctagagaagatggcatggatttggctggcactgatctgaaaaggcaagtcgacaaagatcagacagtcctttctcatttcctcgccaaaaacgttctgtaagaccacggttgtatctttctattgactcagactctgagtgaagggaagtgaatcttttttgctgagataattgctgcttt

SEQ ID NO: 390 - protein, 578 aa, Populus trichocarpa
MFQLMVQAQRRVWRKHFISLEQTRIYWQNKNMIFRMQWPQYADLQVNGIAVRAINRPGSQLLGANGRDDGPIITSCAKDGINKISLTGCDARIFCLGVRIVKRRTVQQVSVLKMHLLVFVAALVVELQQMMPIVTVTVTWKLLQILLVSIFVVLHCVEDITEIEVKPDGSWRVKTKTESDHRDAGELAQWHNPDSTLCVPYTGELKSKVEMKQIKQEGGSEGNAGASLKLGIRKNRNGFWEVSKPDDMNTSSSGRLQENFELYEQKVIPMSSSATGSGRDGEDPSVNQDTGENFEFTNNGMELDSLSLNVYSTYGFTDQNLSAPVGNAEVIVLSDSDEENDILMSSGSVYKSNQNGGATISVPSPEIADHFLEDPTLGTGGNSCLGLFNADEYGMPLWPLPPGNQAGPGFQLFNSDVSDALVDLPHDPVNCPSSMNGYTLAPETVMRSTCLIPDSSIGRSDTDVNDGLVDNPLAFGREDPSLQIFLPTGPSDASMQSDMRDQADVSNGVRTDDWISLRLGGGGATGNHSEAVPSTNRLNSRQQMPSREDGMDLAGTDLKRQVDKDQTVLSHFLAKNVL

SEQ ID NO: 391 - DNA, 3635 bp, Populus trichocarpa
gtctaattttggttttttggacgttgaaagatggatttagttgctagttgcaaggataaattggcattttttcgaattaaagagctcaaggatgtcctgactcagttaggtctttcaaagcaggggaagaagcaggaccttgttgaccggatattagccattctctctgacgaacaagtttccaagttatgggcaaagaagagtgccattggaaaggaagaggtggcaaagctagtggatgacacttacaggaaaatgcaagtgtccggggccactgatttagcatcacggggacaggttgcttctgattgcagtaattcaaagtttaatggtgaaatggatgatccatctcactcagatacaaaagttcgctgtccatgtggaagctcattggagacagagtcaatgattaagtgtgaagattttaaatgtcacgtttggcaacacattggttgcgttataattccagaaaaacccatggagggcatcccacaagttcctgatgtgttctattgtgagatttgtcgactaagcagggctgaccccttttgggttacagttgcacatcctctaagtcctgtgaagctggttgctacaaatgttccagctgatggttcaaggccagtgcagggtgtggagaagacatttcagctcactagggcagacaaggatctgttggcaaaacaagaatatgatgttcaggcctggtgtatgcttttgaatgacaaagttccctttaggatgcaatggccgcaggatacagatctccaggttaatggcttggctgttcgtgctattaatagacctggctcgcaattgctaggtgctaatggtcgtgatgatggtccaattgtcacaccatttgtaaaagatggaatcaataagattttgttaagcggatgtgatgctcgaatcttctgcttaggagttagaattgtaaaacgtcgaacagttcaacaggactcagaaggtgagcgttttgaagatgcacttgctcgtgtttgtcgttgtgttggtgggggaactgcaacagacaatgctgatagcgacagtgacctggaagttgttgcagattcttttggtgtcaatcttcgttgtcctgataaattggcattttttcgaattaaagagctcaaggatgtcctgactcagttaggtctttcaaagcaggggaagaagcaggaccttgttgaccggatattagccattctctctgacgaacaagtttccaagttatgggcaaagaagagtgccattggaaaggaagaggtggcaaagctagtggatgacacttacaggaaaatgcaagtgtccggggccactgatttagcatcacggggacaggttgcttctgattgcagtaattcaaagtttaatggtgaaatggatgatccatctcactcagatacaaaagttcgctgtccatgtggaagctcattggagacagagtcaatgattaagtgtgaagattttaaatgtcacgtttggcaacacattggttgcgttataattccagaaaaacccatggagggcatcccacaagttcctgatgtgttctattgtgagatttgtcgactaagcagggctgaccccttttgggttacagttgcacatcctctaagtcctgtgaagctggttgctacaaatgttccagctgatggttcaaggccagtgcagggtgtggagaagacatttcagctcactagggcagacaaggatctgttggcaaaacaagaatatgatgttcaggatgcaatggccgcaggatacagatctccaggcttggctgttcgtgctattaatagacctggctcgcaattgctaggtgctaatggtcgtgatgatggtccaattgtcacaccatttgtaaaagatggaatcaataagattttgttaagcggatgtgatgctcgaatcttctgcttaggagttagaattgtaaaacgtcgaacagttcaacagatactcaacttgatccctaaggactcagaaggtgagcgttttgaagatgcacttgctcgtgtttgtcgttgtgttggtgggggaactgcaacagacaatgctgatagcgacagtgacctggaagttgttgcagattcttttggtgtcaatcttcgttgtccttggcagtgccccatctgtctcaagaactactccctggagaatataatcattgacccatatttcaatcgcatcacatctaagatgacacattgctcagaagatataacagagattgaggtgaagcctgatggttcctggcgtgtgaaaacaaaaactgaagctgagcgtagggatgttggaggacttgcacaatggcacaatcctgatagtactccctgtttccctgatggtggagaaatcaaaccaaaagtggaaatagtgaagcagatcagacaggaaggtatttcagaaggtaatgctggtactggtttgaaacttggaatcagaaagaaccgcaatggcatttgggaagttagcaaacctgaagatatgaacaccttttcttcaggtagattgcaagaaaactttgaacaccatgaacagaaagttattcctatgagcagcagtgccactggtagtggtcgtgacggggaagatcaaagtgtgaatcaagatgctggtggaaattatgatttcacaaacaatggaatggagcttgattctttatctttgaatgtatatacgacatatggattcactgaccaaaatttacctgtaccactagggaatgcagaagtcattgttcttagtgattcagatgacgataatgatatactaatttcccctggatctgtctacaagagtaatcaaaatgatggcgatgctactttttctgtgccctctcctggaattgcagatccttttccagaagatcctacacttgtgactggtgcaaactcgtgcttgggtcttttcaatgctaatgacgaatatgggatgcccctctggtcactgccttcaggaaaccaagcaggcccaggattccaattatttaattcagatgtctctgatgccttggttgatttgccacatggttctgttaactgccccttgtcaatgaatggctacacattagctccggaaactgtcatgggatctacatgtttaatcccggactcttctcttggtcgatcagagatggatgtgaatgatggcttgcttgataatcccttggcttttggtggagaagatcccagtcttcaaatcttccttccaaccgggccttcagatgcatcaatgcactctgatatgagggatcaagttgatgtgtcaaatggtgtccgttctgaagattggatctctcttaggcttggtggtagtgctactagcaatcatggcgatttggttcctccgactaatggactgaattcaagacagcagatgccatcttctctggattctttgcctggcactgcttcttcgcttggtataaatgatggcagatcagaaaaggcaagtcgacaaagatcagaaagcaccttctcatttcctcgccaaaaacgttctgtaagaccacgaccgtatctttctattgactcggactctgaatgaagggaggtgaatccttttttgccgagataattgctgcttttatttgaaaattttttaggacaggagaccttttctggggt

SEQ ID NO: 392 - protein, 1174 aa, Populus trichocarpa
MDLVASCKDKLAFFRIKELKDVLTQLGLSKQGKKQDLVDRILAILSDEQVSKLWAKKSAIGKEEVAKLVDDTYRKMQVSGATDLASRGQVASDCSNSKFNGEMDDPSHSDTKVRCPCGSSLETESMIKCEDFKCHVWQHIGCVIIPEKPMEGIPQVPDVFYCEICRLSRADPFWVTVAHPLSPVKLVATNVPADGSRPVQGVEKTFQLTRADKDLLAKQEYDVQAWCMLLNDKVPFRMQWPQDTDLQVNGLAVRAINRPGSQLLGANGRDDGPIVTPFVKDGINKILLSGCDARIFCLGVRIVKRRTVQQDSEGERFEDALARVCRCVGGGTATDNADSDSDLEVVADSFGVNLRCPDKLAFFRIKELKDVLTQLGLSKQGKKQDLVDRILAILSDEQVSKLWAKKSAIGKEEVAKLVDDTYRKMQVSGATDLASRGQVASDCSNSKFNGEMDDPSHSDTKVRCPCGSSLETESMIKCEDFKCHVWQHIGCVIIPEKPMEGIPQVPDVFYCEICRLSRADPFWVTVAHPLSPVKLVATNVPADGSRPVQGVEKTFQLTRADKDLLAKQEYDVQDAMAAGYRSPGLAVRAINRPGSQLLGANGRDDGPIVTPFVKDGINKILLSGCDARIFCLGVRIVKRRTVQQILNLIPKDSEGERFEDALARVCRCVGGGTATDNADSDSDLEVVADSFGVNLRCPWQCPICLKNYSLENIIIDPYFNRITSKMTHCSEDITEIEVKPDGSWRVKTKTEAERRDVGGLAQWHNPDSTPCFPDGGEIKPKVEIVKQIRQEGISEGNAGTGLKLGIRKNRNGIWEVSKPEDMNTFSSGRLQENFEHHEQKVIPMSSSATGSGRDGEDQSVNQDAGGNYDFTNNGMELDSLSLNVYTTYGFTDQNLPVPLGNAEVIVLSDSDDDNDILISPGSVYKSNQNDGDATFSVPSPGIADPFPEDPTLVTGANSCLGLFNANDEYGMPLWSLPSGNQAGPGFQLFNSDVSDALVDLPHGSVNCPLSMNGYTLAPETVMGSTCLIPDSSLGRSEMDVNDGLLDNPLAFGGEDPSLQIFLPTGPSDASMHSDMRDQVDVSNGVRSEDWISLRLGGSATSNHGDLVPPTNGLNSRQQMPSSLDSLPGTASSLGINDGRSEKASRQRSESTFSFPRQKRSVRPRPYLSIDSDSE

SEQ ID NO: 393 - DNA, 2684 bp, Populus trichocarpa
tgttattcattttttagggtttttgtgctgatggagatgaatttagtggctagttgcaagggaaagttggcatattttagaattaaagagctcaaggatattttatccctgttgggtctttcaaagcaagggaagaagcaggatttaatggacagagttttgggtttgctctcagatgatgaaatttgctccgctcgcagctttgtaaggaaacagcagattggaaaggaagctgtagtgaaaataattgatgatgcttacagaaaaatgcacataacagatgcatcagatttagcagtgggggctccaagtggctttcatactatgagtgttaaagaagaagttgaagatttcattagtccagagaagaggattcgttgtccttgtggaagttcactgcctaccgagttcatgatacagtgtatagattcaaaatgtcaagtgcaacaacatattagttgcgtcatttttctggagaaccctgtggagagtgaccatccaattccacctgtattttactgtgaaacatgccgtattgaccgagcagatccattcgcgaacaaagggttctactatattaacaagcttcttgtggacagtttttgggttactgtggcgcatctatcattgcctgtgaagttaacgagttcaaatatttcaatggacggtaatatcacatcgcagaaagtggaaacaacttttcaattgacaagatcagatcaacacctactacagaattgtgaatatgatgttcaggcctggtgcatgcttctcaatgataatgttttgtttaggatgcagtggccactttttgcaaatttacaggttaatgatatgtccgtgagaatgctagatagactggtatcacagtctcttggtgctaatggccgtgatgatggtgcacaagtgagtccattccccagtctcctttcttatgagatgattaatatcctacttggcattatcaaattatgcattcgagagggaataaatagaatttctttatcaggatgtgattctcgtgttttctgcttcggcatcagactcgtaaagcgacgaactgttgaacaggttctcaacctgattcccaaagttggtgagtcttttgaagatgctcttgctcgtgtttgtcgttgcattggtggtgggatgagtactacaaacgaagatagtgatagtgatttggaggtgattgcagaggcgattacagttaatcttcgctgtcctatgagtggctctagaatgaagattgctggcagatttaaaccttgtgctcacatgggctgttttgatcttgaaacttttgtgaaactaaatcaacgctcccgcaagtggcagtgtcctatttgtcttaagaattactgcttggaggatattgtcattgatccttacttcaaccgcattacaactttgatgggtcattgtgaagaagacataactgagattgaggtgaaacctgatggttcttggactgtaaagaccaaagttgacataggtgatctcaggcaatggcattttcctgatggttctctttgtgctcttactgatgaagttacttcctgttacaaaatcccgaggcagatcgagaagggagatggcttgaaagcacattttagtcctgagaccggaattaagaataatctcagtggaattgtgcaaggaagaaaccctcagcttgccttttgttcctcaaagaatcaacttgagggaagttttgtaaatcatggccaaaggacactaacaatgagtagtagcaccactggaagtggcggggatgaagaggacccaagtataaaccaagattacagtgggcatgttgaaatatctcccagtagtgtcaatgagatcaactctatctgtcattattttgacccaacacttgcaataaaccatggtagttctgtggcaccagggaatgctgacatcattattctaagtgattccgatgaagagaatgtcaatttagttcctcctgaaactgtctatgatacttacagagtaaatgggagtggttcttcattggctgtcaatcctggaataacagactcatacttagaagatctagctcttgatgcaggtgcaaattcttgttttggtctctttgatacaggtgtcaatgatgttgggatgtctaactggtcatactcttcttgtactcaagctggtccccatttccaattatttaatacagacccggatgtatcagatgcttttattgatctggatcatccttccattagttgtgctgttccaatgaatggttgtacactggcatcaacgccagctataacttctggtggtgaggtcctagattctttagcctgtgacgccaatgttgatatggatgttggcttggttgataatcctatgagatttgttgctgaggacccctcattacaaacatttctcccagttcaacctgtgcagcctgacttggtgcacaagcctcctgtatcaaatcgtgcccctactgaggattggtttccccttagcctcagcagcaccagtgagagttttggcaatcacaccaggaatcatgatcagggtgctgctaaaattggggttgatttgagaaaccagttaggatcaaatcaaggtgcctgattgatattcttacattgttttaagcaatactttggattagatggtaatgttgttgctttatattccagctgattaaatcc

SEQ ID NO: 394 - protein, 857 aa, Populus trichocarpa
MEMNLVASCKGKLAYFRIKELKDILSLLGLSKQGKKQDLMDRVLGLLSDDEICSARSFVRKQQIGKEAVVKIIDDAYRKMHITDASDLAVGAPSGFHTMSVKEEVEDFISPEKRIRCPCGSSLPTEFMIQCIDSKCQVQQHISCVIFLENPVESDHPIPPVFYCETCRIDRADPFANKGFYYINKLLVDSFWVTVAHLSLPVKLTSSNISMDGNITSQKVETTFQLTRSDQHLLQNCEYDVQAWCMLLNDNVLFRMQWPLFANLQVNDMSVRMLDRLVSQSLGANGRDDGAQVSPFPSLLSYEMINILLGIIKLCIREGINRISLSGCDSRVFCFGIRLVKRRTVEQVLNLIPKVGESFEDALARVCRCIGGGMSTTNEDSDSDLEVIAEAITVNLRCPMSGSRMKIAGRFKPCAHMGCFDLETFVKLNQRSRKWQCPICLKNYCLEDIVIDPYFNRITTLMGHCEEDITEIEVKPDGSWTVKTKVDIGDLRQWHFPDGSLCALTDEVTSCYKIPRQIEKGDGLKAHFSPETGIKNNLSGIVQGRNPQLAFCSSKNQLEGSFVNHGQRTLTMSSSTTGSGGDEEDPSINQDYSGHVEISPSSVNEINSICHYFDPTLAINHGSSVAPGNADIIILSDSDEENVNLVPPETVYDTYRVNGSGSSLAVNPGITDSYLEDLALDAGANSCFGLFDTGVNDVGMSNWSYSSCTQAGPHFQLFNTDPDVSDAFIDLDHPSISCAVPMNGCTLASTPAITSGGEVLDSLACDANVDMDVGLVDNPMRFVAEDPSLQTFLPVQPVQPDLVHKPPVSNRAPTEDWFPLSLSSTSESFGNHTRNHDQGAAKIGVDLRNQLGSNQGA

SEQ ID NO: 395 - DNA, 2292 bp, Chlamydomonas vulgaris
atgcctgcactgctgccgctgctgcgctctgtctgcctggggctgctgcctctcgggctgagcaatatttgcgcatccttcccgacgctctgctgcgagttgagcggaggctcttggactcgtgctggcagctccagcgcgcaaattatggcgagtgccactctgaggaggtacattttcgccttccgcgtggccgagctacagctgtgcctgcaagagctcggcctgtccaaaaagggactcaaaggggagctccagtctcgtctgtttgcctactttggcgattacactggagtggccgcccggggggtcaaccctcccaaggagcagcatagactcgacacagcagcgcgattggtcacccagatataccatcgcatgaagggcttacccagccctgaggctcttccagccagggagaccataccaactgcagggtaccttcagggctctggagatgtgccgttggctcccgcggctcctattctgccgaatgggaatgcagctgcggcagtgcaagcagccgcgaggagtaacacacagatcagatgcatctgtggaagcaactatgaccgaggcaccatgatccagtgcgaggatgaggcatgcggggtgtggcagcactgcgactgcgtgggcgtggacttgaacgtgatgccggagcactatttatgcgagctgtgtcggctggcgcgagcggaccccttctggcgccgcgtgggggcccccgtcatgtcccccgtgaagctggcgcccgtgcagccgccgcgcagcttccccgatggcaggacccaggaggaggatgtcgtgcaggtggcagaccgcaatttcatgctcacccacgcacagatcgacccagcgcgccgtcagagccacaacttccagctgcaggtggcatgcataatgatgggagacagcgtgccgatgcgaatacactggccgcggcatgcggacctgcggctgaacaacatgctgtatcggccctactcccgcaactctgccaccaagctgggcgccaatgctcgggatgagcctgcctccgttggcgtcatgtgctcgcaggggcgcaaccggctgtgggtgtcggtgatggagtcgcgcagcttctgcgtgatggtgcagctggcgcagcgccggacaatggacgaggtcaaggcgctcatggccccgcctgagaccgagcaggccgccctcaaacgtgtcgtccgccagacgcgcggcgtgaagggggaaggggatgagagtgatgacgaggtggagattgggcgcacagtggtgtcgctgcggtgtcccatgtccggcagccgcatgcgcgtgccggcgcgctttgcgtcggtgggcggcctcaacgcgttcgacctggacacctttctggacgtggtgcagcgcagccgcaaatggcagtgcccccactccatgcgcaacctgcccgtgcagcagctcatggtcgacgcctacctctcccacatcctcgcccgcctcaaggccgtgagcccagtccagttacttcagggtccccgctacgctgcctggttctgctatgtaacgctctatggagtgcacctgatcatctgccagatgtgttactttcccggggaggtggcctccgctgaggaggccacagacatggctgaggtgacagaggtggaggtgtcgccgggcggggagtggcgcgtgggtggtacagaggggcgctggcactccatctccgaggaccccagcctccccatcgaagacgtcaaagtcaaggctgaccctgaaaccgccaaacaggaagcaggcagcgcgggcgcgtttgacagcgacagcgacgaggagatgtcagagggcgaggagctgcgcagggcggcagctgcggccaagtcaacagtgcggcccaagccgccgccggacgtgatcgtcatcagcgactctgacgaggaagacgatgcagagatgtctcgtcaagggccggcgcccgctccgctccggccaccagctccaccgcagcagcaccagcagacagggtatcaaccggcagggcacgcgccgcagccagaagcgagctcgtcgggccgcgggcaactccagcactcgcccaattcctacggccggcagcagggacctgctcctactggacgctcctacgtagggccgtatcccggctcgttgccggccgccggcgggcaccgagcggctgaccggcccgggggaggcaccgtcgttcgcggccgcggcatcacactgcggctgcctccgcggccggagcgcccaccgtccggtcagtcgcctttcccgatgtcaggcgtatag

SEQ ID NO: 396 - protein, 763 aa, Chlamydomonas vulgaris
MPALLPLLRSVCLGLLPLGLSNICASFPTLCCELSGGSWTRAGSSSAQIMASATLRRYIFAFRVAELQLCLQELGLSKKGLKGELQSRLFAYFGDYTGVAARGVNPPKEQHRLDTAARLVTQIYHRMKGLPSPEALPARETIPTAGYLQGSGDVPLAPAAPILPNGNAAAAVQAAARSNTQIRCICGSNYDRGTMIQCEDEACGVWQHCDCVGVDLNVMPEHYLCELCRLARADPFWRRVGAPVMSPVKLAPVQPPRSFPDGRTQEEDVVQVADRNFMLTHAQIDPARRQSHNFQLQVACIMMGDSVPMRIHWPRHADLRLNNMLYRPYSRNSATKLGANARDEPASVGVMCSQGRNRLWVSVMESRSFCVMVQLAQRRTMDEVKALMAPPETEQAALKRVVRQTRGVKGEGDESDDEVEIGRTVVSLRCPMSGSRMRVPARFASVGGLNAFDLDTFLDVVQRSRKWQCPHSMRNLPVQQLMVDAYLSHILARLKAVSPVQLLQGPRYAAWFCYVTLYGVHLIICQMCYFPGEVASAEEATDMAEVTEVEVSPGGEWRVGGTEGRWHSISEDPSLPIEDVKVKADPETAKQEAGSAGAFDSDSDEEMSEGEELRRAAAAAKSTVRPKPPPDVIVISDSDEEDDAEMSRQGPAPAPLRPPAPPQQHQQTGYQPAGHAPQPEASSSGRGQLQHSPNSYGRQQGPAPTGRSYVGPYPGSLPAAGGHRAADRPGGGTVVRGRGITLRLPPRPERPPSGQSPFPMSGV

SEQ ID NO: 397 - DNA, 2420 bp, Sorghum bicolor
atggtgctgaaaatagtggaggacacttttagaaaaatgcaagaggctacaaatactgtaacgccctcaaggagccacggcagtgttaagcctaaaaagaaacctgagtctgctcaggcagttaaggttcgttgcccttgtggtgactccaagccaaatgattccatgattaagtgtattgatccacaatgcaacatgtggcaacatgttggctgtgttatcatacccgatgctgagaagtctgcagacaatatttctcctgaattaccttcctgcttttattgtgaagtgtgccgacttagcagggctgatcctttttgggtcaccatgcaccatctattactccctgtcttaataggaccctctactgtagcagcagacgggatgcagtggcctttacactctgacatgcaagttaatggtatttatgttagggtggttaacaggcaaccccaccaaaagttaggggccaatggtagagacgatggtccactattaacagattacctgaaggagggacctaacaagatttctctatcgagaaatgactctcgtactttctgtttggggatcagaattgccaagaggagatctctagaacaggaacaagatggtgaaaagtttgatgatgcccttgctcgtgtgcgtcgctgtgttggtggtggagctgaggcaaataatgcagacagtgatagtgatatcgaagttgtggctgattctgtctccgtgaatcttcggtgccctatgactgcttcaaggatccagattgctggtaggttcaagccctgtgctcacatgggttgttttgatttagaagcttttattgaaataaaccaacgttcccggaagtggcaatgtccaatttgcctgaagaattactctctagagaacataataattgatccttacttcaatcgcattacttctttgatcaaaagttgtggagatggtacgtctgaaattgatgtcaagcctgatggttcctggagagttaagggcagagctgaactgaaggaccttgtacagtggcatcaaccagatggtactctctctgtggccacagatacagcagccaaacctgaaatttgcattgtaaagcatgaggttaaagaagagccgctgtctgaagaggtgggatgtcttaagttgggacttaggaaaaaaagcaacggccagtgggaaattagcaagataggggatgctgatctggtgccatcttctggtaatgaccattcaagatacaatgaaaacaaaaactgcatcactctctcaagcaatattggtgatacaaacattacagatgaaggttataatttagagccagcaacaaatggtgatcctacaacccatgtccatgatcttgattcttcatcctcagatcaaaatggtcctccagcatcaacagggcaggatataatagttttgagtgactcggatgatgatgatgtcatggtgttgtctcctggtgctgtgaactgtggctcgacgcatgacactggaaatatgtttccactcaacacacctgaaaatttaggagtgtgtagcgaacaaactggtgtatgcccaaaggaaagctcatttgttgcattaagagaaggttttggtgacctgggattgtccttttgggaatgtcctaggagtccccgagatgatcctacttcccagatacttgataccagtacaaaggcaacagataatccaggtgaagtggaaaactaccctgccaatgatcaacctaagcaaggcccagtttctggggcggtagaagcaaacccggtgccagtggaagatgaacatgatagcgcattgcatccttgtccatcaaatgaaagagatagtgccatgggtcttgctaacctgggagcagacactgaaacatgtgttgatgtccattccgacaaatggacagatgtcagcattagtggctctggtgaagatttcactagtgccaaaattgcatctaagaaaaggaacaatcctggagacagaataacagctttagatggttcacttgtcggaagtgcaaatgacgatgagagcgcccgagagagagatggtcctttctcaccaccacagcagcgttcagttcggccaagagtgatactagacattgcctcagattctgattagcatagatagatttgtgttggctgattcccgttatagaatctgtagcggtctcctacctgcctgcgtggcttggagaaaaggaaggggtagagtgtgaatggatgtaatgtaatggtgtctaaggcattaggtcagcgagctggcaagcagtgagaggcagaggcatctcctgtatttggagatcccagctctgttaggtggtagaatgtgatgacaggagcaatatatatatatatataccagtcacataatagagcagaatatatagtcatgaactgaggtggcaggca

SEQ ID NO: 398 - protein, 709 aa, Sorghum bicolor
MVLKIVEDTFRKMQEATNTVTPSRSHGSVKPKKKPESAQAVKVRCPCGDSKPNDSMIKCIDPQCNMWQHVGCVIIPDAEKSADNISPELPSCFYCEVCRLSRADPFWVTMHHLLLPVLIGPSTVAADGMQWPLHSDMQVNGIYVRVVNRQPHQKLGANGRDDGPLLTDYLKEGPNKISLSRNDSRTFCLGIRIAKRRSLEQEQDGEKFDDALARVRRCVGGGAEANNADSDSDIEVVADSVSVNLRCPMTASRIQIAGRFKPCAHMGCFDLEAFIEINQRSRKWQCPICLKNYSLENIIIDPYFNRITSLIKSCGDGTSEIDVKPDGSWRVKGRAELKDLVQWHQPDGTLSVATDTAAKPEICIVKHEVKEEPLSEEVGCLKLGLRKKSNGQWEISKIGDADLVPSSGNDHSRYNENKNCITLSSNIGDTNITDEGYNLEPATNGDPTTHVHDLDSSSSDQNGPPASTGQDIIVLSDSDDDDVMVLSPGAVNCGSTHDTGNMFPLNTPENLGVCSEQTGVCPKESSFVALREGFGDLGLSFWECPRSPRDDPTSQILDTSTKATDNPGEVENYPANDQPKQGPVSGAVEANPVPVEDEHDSALHPCPSNERDSAMGLANLGADTETCVDVHSDKWTDVSISGSGEDFTSAKIASKKRNNPGDRITALDGSLVGSANDDESARERDGPFSPPQQRSVRPRVILDIASDSD

SEQ ID NO: 399 - protein, 1474 aa, Sorghum bicolor
GAAAGGGTTGCCAAACATTTAGTTTTCCCCAGCAGTTGCTTCTCATAGCTTTTTCCATAAATCAACTTGTGCATGAGTTTAAGCTTGTGCCAAACAGGGCCTGTTTTCTTTGCATTCCTTCACAGAAAGTCACCCATTTTTTTTCTTTTAATCTGTTTTTTTAATCTTGTGACAGATGACTGCTTCAAGGATCCAGATTGCTGGTAGGTTCAAGCCCTGTGCTCACATGGGTTGTTTTGATTTAGAAGCTTTTATTGAAATAAACCAACGTTCCCGAAAGTGGCAATGTCCAATTTGCCTGAAGAATTACTCTCTAGAGAACATAATAATTGATCCTTACTTCAATCGCATCACTTCTTTGATCAAAAGCTGCAGAGATGATACGTCTGAAATTGATGTCAAGCCTGATGGTTCCTGGAGAGTTAAGGGCAGAGCTGAACTAAAGGACCTTATACAGTGGCATCAACCAGATGGTACTCTCTGTGTGGCCACAGATACAGCAGCCAAACCTGAAATTTGCATTGTAAAGCATGAGGTTAAAGAAGAGCCGCTGTCTGAAGAGGTGGGATGTCTTAATTTGGGACTTAGGAAAAAAAGCAAAGGCCAGTGGGAAATTAGCAAGTTAGGGGATGCTGATCTGGTGCGATCTTCTGGTAATGACCATTCAAGATACAATGAAAACAAAAATGACATCACTCTCTCAAGCAATATTGGTGATACAAACATTGCAAATGAAGGTTATAATTTAGAGCCAGCAACAAATGGTGATCCTACAACTCATGTCCATGATCTTGGTTCTTCATCCTCAGATGAAAATGGTCCTTCAGCATCAACAGGACAGGATATAATAGTTTTGAGTGACTCAGATGATGATGTCATGGTGTTGTCTCCTGGTGCTGTGAACTGTGGCTCAACACATGACACTGGAAATCTGTTTTCAATTAACACACCTGAAAATTTAGGAGTGTGTAGCGAACAAACTGTTGAATGCCCAAAGGAAAGCTCATTTCTTGCAGTAAAAGAAGGTTTTGGTGACCTGGGATTGTCCTTTTGGGAATGTCCTGGGAGTCCCCGAGATGATCCTACTTCCCAGATACTTGATACCAGTACAAAGGCAACAGATAATTCAGGTGAAGTGGAAAACTACCCTGCCAATGATCAATCTATGCCAGGCTCAGTTTCTGGGGCTGATTTGGGGGTACCAGCAAACCTGGTGGAAGATGGGGATGATGGCGCATTGCAACCTTGTTCATTAAGTGAAAGAGATAGTGCCATGGGTCTTGCTAACCTGGGAGCAGACACTCAAACATGTGGTGATGTCCATTCTGACAAATGGACAGCTGTCAGCATTAGTGTCTCTGACGAAGATTTAACTAGTGCCAAGATTGCATCTAAGAAAAGGAGCAATCCTGGAGACAGAATAACAGCTTTAAATGGTATGGAAGAAGTCTTCACTCCTTTTGCTTTCATGTGA

SEQ ID NO: 400 - protein, 432 aa, Sorghum bicolor
MTASRIQIAGRFKPCAHMGCFDLEAFIEINQRSRKWQCPICLKNYSLENIIIDPYFNRITSLIKSCRDDTSEIDVKPDGSWRVKGRAELKDLIQWHQPDGTLCVATDTAAKPEICIVKHEVKEEPLSEEVGCLNLGLRKKSKGQWEISKLGDADLVRSSGNDHSRYNENKNDITLSSNIGDTNIANEGYNLEPATNGDPTTHVHDLGSSSSDENGPSASTGQDIIVLSDSDDDVMVLSPGAVNCGSTHDTGNLFSINTPENLGVCSEQTVECPKESSFLAVKEGFGDLGLSFWECPGSPRDDPTSQILDTSTKATDNSGEVENYPANDQSMPGSVSGADLGVPANLVEDGDDGALQPCSLSERDSAMGLANLGADTQTCGDVHSDKWTAVSISVSDEDLTSAKIASKKRSNPGDRITALNGMEEVFTPFAFM

SEQ ID NO: 401 - DNA, 2852 bp, Sorghum bicolor
cctcatttttattgtgaattgtgccgactgaaccgggcagacccgttttgggtgactacaggaaatccattactacctgtgaaatttatgtcatctggtgttggaaatgatggagcaagtgtacctcaaattgtggagaagaccttccagctttcccgagcagatagagaaacagtccagagacctgaatacgatctccaggtttggtgcattcttataaatgacaaagtccagttcaggatgcaatggcctcaatatgcagaattgcaagtgaatggtattcctgtacgagtaatgaccaggcctggttctcagttactagggataaatgggcgggatgatggaccactggtaaccacatgcagtagagaagggatcaataaaattagcttatcaagagttgatgcccgaaccttttgctttggagttcgaattgttaggaggaggactgttcctcaggtattaaacttgatcccaaaggaaggtgaaggggagtcttttgaggatgctcttgctcgtgtccgtcgctgtcttgggggtggaggtgctacagacaatgctgatagtgatagcgatctggaagtggttactgaatctgttacagtcaaccttcgttgccctaatagtggatccagaatgaggattgctggaaggttcaagccttgtgttcacatgggctgttttgatcttgaaacttttgtggaattgaatcaacgctcacgcaagtggcaatgcccaatatgtttaaagaattactctctcgagaacttgatgatcgatgcttatttcaatcggattacttctttgttgcaaaattgcagtgaagatgttaatgagcttgatgttaaacctgatgggtcttggcgtgtgaagggtgatgccgctaccagagatctatctcagtggcatatgcctgatggtactctttgtgactcaaaggaagatacaaaccctggtgtcacaagtgttaatgagttcaagagagagggtacttctgatggacatagaactttgaaaattaaaaaaaaccctaatggatcatggcaggttagcagtaaagcagatgataaaaaacctgtggttagacatcacatccaaaacaacaatgggttctcaacaccaaacatgcctattatcagtagccccactgggagttatcgagatggcgaagatgcaagtgtgaaccaagaagggggtggtattcaatttgatatagcattgaaccaagagtttgacagttttgcacataactttggtcagacatacaatacagaggatagacaacagccacaacataatgctgcagatgtcattgttcttagtgattctgatgaagaaaatgacccgattgttcgcccgccagctgtctatgcaaatgcaactacaaatggtgacagttttcctttcgtcactgatgctgctggaactggatatcctgaaaggtaccaggaggatgctggcgttggtacaagtggccttggtttattgaacaacaatactggtgattttgaaataaataactggcaaatgcattcttatccacaaccggagcaagggttccagttttttgggactgatactgatgttggcaatccttttgttggtccacataattccttcaatattgcaccagaagactactcgcttgactgtaatgttggcatagaggatccctctgcagctcacgatgtttcaatttgccgaaacagtaatgatgtgcatggaagcttggttgataacccattggctttagcaggcgacgatccatctttgcaaatttttcttccaagtcaaccttccactgttccccttcaggaagaattgagtgagcgtgctaatactccaaatggagtccaccctgacgattggaggatatctcttacgcttgcggccggtggagggggtaatgaagagtctacaagtgttgatggtctaaaatcacagccaaaagttccatcgaaagaggcaggagtcgaacctttgcttgatgctgcttctgctctcccaagcatgaacagatgtaatggatctaatctaaatccaagaaggattgaaaatatattttctcaccctcgccaaccgcggtctgttaggcctcgtctgtgtttgtcattagatactgattcagagtagtttggacatcacactgggatagctgaatttgctactaatctggcaaagttggcttccagaatcttgatttttactgtggagggctcaggttattgttgttgatacaaagagaaacaccagtgtggatgctttgttgcattaacctgggaagattcaagtgttctatatgatccaagtgggatctgcatagagttcatctaatggttggtacaggatattttctaactgggagtggtttaatgtggctagtggagcaggctgtacattttccctgacatttactgggtataaggaatagggggccatcacttggcataagacaaatacatgtgaatgttttgtgtgtaccatcattgtatttagggtttgggtgctaatttagatgtttattattaccctgatgtttgatggaaaataaattattccttgaagtggcggtcaataaacagagcccccttcggttttgagtcggagctgctgaccgttcatctgttcttgttgttgttgtgaagtggtagcttcgttcagcttcagcttccatggtgggaccaatcatgccaaagttgtgtctagcagagggcaatctccatggtgtcttgcaatacaagtactcgtatattttgctctccaggatgataagtttctttgtgcatcatgctgtattatgccggtgttccccttctcatttcttgcttcactgaactgcttggcatagtttg

SEQ ID NO: 402 - protein, 681 aa, Sorghum bicolor
MSSGVGNDGASVPQIVEKTFQLSRADRETVQRPEYDLQVWCILINDKVQFRMQWPQYAELQVNGIPVRVMTRPGSQLLGINGRDDGPLVTTCSREGINKISLSRVDARTFCFGVRIVRRRTVPQVLNLIPKEGEGESFEDALARVRRCLGGGGATDNADSDSDLEVVTESVTVNLRCPNSGSRMRIAGRFKPCVHMGCFDLETFVELNQRSRKWQCPICLKNYSLENLMIDAYFNRITSLLQNCSEDVNELDVKPDGSWRVKGDAATRDLSQWHMPDGTLCDSKEDTNPGVTSVNEFKREGTSDGHRTLKIKKNPNGSWQVSSKADDKKPVVRHHIQNNNGFSTPNMPIISSPTGSYRDGEDASVNQEGGGIQFDIALNQEFDSFAHNFGQTYNTEDRQQPQHNAADVIVLSDSDEENDPIVRPPAVYANATTNGDSFPFVTDAAGTGYPERYQEDAGVGTSGLGLLNNNTGDFEINNWQMHSYPQPEQGFQFFGTDTDVGNPFVGPHNSFNIAPEDYSLDCNVGIEDPSAAHDVSICRNSNDVHGSLVDNPLALAGDDPSLQIFLPSQPSTVPLQEELSERANTPNGVHPDDWRISLTLAAGGGGNEESTSVDGLKSQPKVPSKEAGVEPLLDAASALPSMNRCNGSNLNPRRIENIFSHPRQPRSVRPRLCLSLDTDSE

SEQ ID NO: 403 - DNA, 2475 bp, Zea mays
catcatggatggggaaggaaaaatgctcttacaagggaggcggtggcaaaagttgttgatgacacatacagcaggaaaatgcaagtatgtgctcctgaccttccctctagaagccacagtggatcagatttcagtcatttcaggcccaaagaggaagcgcctgacttctaccatgtggatactaaggtccgctgcctttgcaatagcacattgctaaatgacaatatgattaagtgcgaagatggcaaatgccaggtgtggcagcatattacctgcgtactcattccagataagcccacggagggtgctggccctgatattccacctcatttttattgtgaactgtgccgactgaaacgggcagacccgttttgggtgactaccggaaatccattactacctgtgaaatttatgtcatctggtgttggaaatgatggagcaagtgtacctcaaattgtggagaagactttccaactttcccgagcagatagagaaacagttcagagacaagaatatgatctccaggtttggtgcatccttataaatgacaaagtccagttcaggatgcaatggcctcaatatgcagaattgcaagtgaacggtattcctgtacgagtaatgaccaggcccggttctcagttactagggataaatgggcgggatgatgggccactggtaaccacatgcagtagagaagggatcaacaaaattagcttatctagagtggatgctcgaaccttttgctttggagttcgaattgttaggaggaggactgttcctcaggtattaaatttgatcccaaaggaaggtgaaggggagtcttttgaggatgctcttgctcgtgttcgtcgctgtcttggaggtggaggtgctacggacaatgctgatagtgatagcgatctggaagtggttactgaatctgttacagtcaaccttcgttgccctaatagcggatccagaatgaggattgctggaaggttcaagccttgtgttcacatgggctgttttgatcttgaaacttttgtggaattgaatcaacgctcacgcaagtggcaatgcccaatatgtttaaagaattactctctcgagaacttgatgatcgatccttatttcaaccggattacatctttgttgcacaattgcagtgaagatgttaatgagcttgatgttaaacctgatgggtcatggcgtgtgaagggtgatgccgctaccagagatctatctcagtggcatatgcctgatggcactctttgtgactcaaaggaagatacaaaccctggtgtcgttagtgttaatgagttcaagagagagggtacttctgatggacatagaactttgaaacttggaattaaaaaaacccctaatggattatggcaggttagcagtaaaccagatgataagaaacccgtggttagaaatcacatccaaaacaacacggggtactcaataccaaacatagtacctatgatcagtagccccactgggagttgcagagatggtgaagatgtaagtgtgaaccaagaagggggtggtattcagtttgatatatcattgaaccaagagtttgacagttttgcgcataactttggtcaaacatacaatacagaggataggcaacaagagccacaacataatgctgcagatgtcattgttcttagtgattctgatgaagaaaatgacccgattgttcgcctgccagctgtctatgcaaatactcctacaaatggtgacagtttccctttcgtcactgatgctgccgtatctggatatcctgaagggtaccaggaggatgctggggttggtacaagtggccttggtttattgagcaacaatactggtgattttgaaataaataactggcaaatgcattcttatccacaaccagagcaagggttccagttttttgggactgatactgatgttggcaatccttttgttggtccgcataattcctttagtattacaccagaagactattcccttgactgtaatgttggcatagaggatccatctgcagctcacgatgtctcaatttgccgaaacagtaatgatgtgcatggaagcttggttgataacccattggctttagcaggtgacgatccatctttgcaaattttccttccaagtcaaccttctactgttccccttcaggaagaactgagtgagcgcgctaatactccaaatggagtccaccctgatgattggaggatatctcttacgcttgcggctggtggagggggtaatgaagaacctacaagtgttgatggcctaaaatcacagccaaaagttccatcaaaagaggcaggagttgaacctttacttgatgctgcttctgctctcccaagcatgaacaatgacagatgtaatggatctaatctaaacccgagaaggattgaaaatatattttctcaccctcgccaaccacggtctgttaggcctcgtttgtgtttgtcattagattctgattcagagtag

SEQ ID NO: 404 - protein, 824 aa, Zea mays
HHGWGRKNALTREAVAKVVDDTYSRKMQVCAPDLPSRSHSGSDFSHFRPKEEAPDFYHVDTKVRCLCNSTLLNDNMIKCEDGKCQVWQHITCVLIPDKPTEGAGPDIPPHFYCELCRLKRADPFWVTTGNPLLPVKFMSSGVGNDGASVPQIVEKTFQLSRADRETVQRQEYDLQVWCILINDKVQFRMQWPQYAELQVNGIPVRVMTRPGSQLLGINGRDDGPLVTTCSREGINKISLSRVDARTFCFGVRIVRRRTVPQVLNLIPKEGEGESFEDALARVRRCLGGGGATDNADSDSDLEVVTESVTVNLRCPNSGSRMRIAGRFKPCVHMGCFDLETFVELNQRSRKWQCPICLKNYSLENLMIDPYFNRITSLLHNCSEDVNELDVKPDGSWRVKGDAATRDLSQWHMPDGTLCDSKEDTNPGVVSVNEFKREGTSDGHRTLKLGIKKTPNGLWQVSSKPDDKKPVVRNHIQNNTGYSIPNIVPMISSPTGSCRDGEDVSVNQEGGGIQFDISLNQEFDSFAHNFGQTYNTEDRQQEPQHNAADVIVLSDSDEENDPIVRLPAVYANTPTNGDSFPFVTDAAVSGYPEGYQEDAGVGTSGLGLLSNNTGDFEINNWQMHSYPQPEQGFQFFGTDTDVGNPFVGPHNSFSITPEDYSLDCNVGIEDPSAAHDVSICRNSNDVHGSLVDNPLALAGDDPSLQIFLPSQPSTVPLQEELSERANTPNGVHPDDWRISLTLAAGGGGNEEPTSVDGLKSQPKVPSKEAGVEPLLDAASALPSMNNDRCNGSNLNPRRIENIFSHPRQPRSVRPRLCLSLDSDSE

SEQ ID NO: 405 - DNA, 3504 bp, Sorghum bicolor
ggaattttgtaagtggagagagagagatttgttctggcattgttttgagtctcctcgatcggtcaaaagaacacgcaaagcaaacccaacccagccacccccaacacaacacaaaccgtgtgctaacaatagtatagtgggtgtgaacccccaaaccctaatccttcgtttctatgaccgagtgctgttggtgtcagcatgcgctagcttcgtcgtcgtcgtcatcgattttccggtttgtgattctcgtgattcttctcgggccgaattattgggtttgacggcatggatttggtaccgagcgtcaaggaaaagttgaactattttcgtataaaagagctcaaagatgtgctcactcagttacacctttcaaagcagggaaagaagcaggatcttgttgatcgcatattatccgttctctcagatgaacaagtttcaaaaatgtgggctaagaagaatgctggtggaaaagaacaggtggcaaaattagtggatgatacatataggaaaatgcagatatcaggggccactgatctagcttctaagggacagggtgcatcagatagcagtagtgtaaaggttaaaagtgaatttgatgatgcttttcaacgagatgtaaagattcgctgtctatgtggaagtagattggaaacagaggatttggtcaagtgtgatgatccaagatgccatgtgtggcaacacatcagttgtgttattattcccgagaaacctaccgaaggcatcccaccagttcctgataaattttattgtgaactctgtcgtctcactcgtgcagacccattttgggtttcagtggcacaccctttgcatcctgtgaagttgaccacaaccagtaatccaactgatggaaacaacccagtgcagagtgtggagagaacatttcaactgactagagctgacatggacttagtatcaaaaccagaatttgatgttgaggcttggtgtatgctcctgaacgacaaggttccattcaggatgcaatggccacagtatacagacctgcaggtcaatggtgttcctgttcgtgcaactaacagacctggttcacagttgcttggggctaatggtcgggatgacggtccaattatcacgccatatacaaaagacggaattaataagatttccttaacaggatgcgatgctcgcattttttgtttaggggttcgtattgttaaaaggcgcagcatgcagcagatcctaaactcaatcccaaaggagtctgatggagagaaatttgaagaagctcttgcacgtgtctgccgttgtgttgggggaggaaatgcagctgatgatgctgatagtgacagtgatttggaagtggtttcagatactttcactatcaaccttcgatgtcctatgagtggttcaagaatgaagattgcaggaagatttaaaccctgtattcacatgggttgctttgatcttgaagtttttgtggaaatgaatcagcgatcaagaaagtggcaatgtcctatatgtctcaaaaactatgctttggagaatatcatcattgacccttatttcaatcgcatcacttctatgatgatgaactgtggcgaagaaattgcagagattgaggtgaagcctgatggttcttggcgtgttaaggtaaagagtgaaagtgaacgcctggaattaggaaatctagcacagtggcgccttcctgatggaaccctttgtgtttcaactgatgttgatgttaagagagtggatacattgaagcaggttaaacaggaaggtgtttcagacagtcctgctggtttaaaacttggcataaagaagaattgcaatggagtttgggaagtcagtaaacctgagggcacaaacacctcttctggtaataatttgaaaagggtttttggaaatcccgaacaggttgttattccaatgagcagcagtgccactggaagtggtcgggatggtgacgatcctagtgtaaatcagggtggtggtgggcatattgactattccactacaaatgggattgagatggattctttgtgtctcaataatgttgatttagcatatgaatatactgcacccaacacttctgcccaggtgggtggtgcagaagttattgttcttagtgattctgaagaagacaatgatctgttggcatctcctgcaattgcatataagaacaacagaaatgatgctacagatggttactctgtaccaccacctgtaattgttgattcatatactgaagatcataatcttggtggaaattcatgcttgggactctttcctaatgatgatgattttgggatgtcttccctatggccattgccttctggaagtcaagctggtcctggcttccagttatttggttctgatgcagatgtgtctgacgcattggtccatctgcagcatggtcctatgaattgctcctcgtcactaaatggttatgcattggccccagatactgctttgggatctggcggtatcttgcaagagtcctctgctggtcgctcagttgctgatttgaatggtggtttggtggacaatccattggcatttggtggagatgatccctcatttcagatttttctccccacaagaccagcagattcatccatgcacaatgaattgagagatcaagcaaatgtggctaatggtgtctgcactgaggaggattggatatcccttagacttggaggtggtgctggtggtaacaatggtgatgctcccactcaaaatgggttgaattctagacatcaaatcccaaccagagaaggcgccaagaatactttggatgatactgcttctttactccttgggatgaatgatgttagatctgacagggcaagaaggcaaagatcagatagccctttctcctttcctcggcaaaagcgttcagtaaggccccgcttgtacctttctattgattcagattcagagtaaaggtcagaccttgtgtctcaagaactttaggtactcttaacatcagatttcgtatttagaaattgaagaaagttgagaggcatttttggtcctcatgaaatggcagttaatacataatgataatgtggtctgaggcatctctggtggaacagagctacaaattaccctgtgccaaaatgctttcacctaccccattggcaaagatgttggccctaatgattctttgctcttgatatctaaattgtccttgtgacagatgtttgctgggggtatagtgctggtttgttgtatagttaatcattcaaatctgtagttcaaactttcaaatttggtggtatattatttctgcatttttgtctctgctgagagcaataacctgtaaatgttttagccacatatcagatccaacagtgaaatcaaagatattgtttctggccatttttctagaatactatgttgtctcaagtatcatgcctcatgatcggccaagatagacgcccatttcataacacctggacgttgacatttatttaacatgtttaggcacctatgatgcctccccgaaaaaaaaaaaaaaaa

SEQ ID NO: 406 - protein, 879 aa, Sorghum bicolor
MDLVPSVKEKLNYFRIKELKDVLTQLHLSKQGKKQDLVDRILSVLSDEQVSKMWAKKNAGGKEQVAKLVDDTYRKMQISGATDLASKGQGASDSSSVKVKSEFDDAFQRDVKIRCLCGSRLETEDLVKCDDPRCHVWQHISCVIIPEKPTEGIPPVPDKFYCELCRLTRADPFWVSVAHPLHPVKLTTTSNPTDGNNPVQSVERTFQLTRADMDLVSKPEFDVEAWCMLLNDKVPFRMQWPQYTDLQVNGVPVRATNRPGSQLLGANGRDDGPIITPYTKDGINKISLTGCDARIFCLGVRIVKRRSMQQILNSIPKESDGEKFEEALARVCRCVGGGNAADDADSDSDLEVVSDTFTINLRCPMSGSRMKIAGRFKPCIHMGCFDLEVFVEMNQRSRKWQCPICLKNYALENIIIDPYFNRITSMMMNCGEEIAEIEVKPDGSWRVKVKSESERLELGNLAQWRLPDGTLCVSTDVDVKRVDTLKQVKQEGVSDSPAGLKLGIKKNCNGVWEVSKPEGTNTSSGNNLKRVFGNPEQVVIPMSSSATGSGRDGDDPSVNQGGGGHIDYSTTNGIEMDSLCLNNVDLAYEYTAPNTSAQVGGAEVIVLSDSEEDNDLLASPAIAYKNNRNDATDGYSVPPPVIVDSYTEDHNLGGNSCLGLFPNDDDFGMSSLWPLPSGSQAGPGFQLFGSDADVSDALVHLQHGPMNCSSSLNGYALAPDTALGSGGILQESSAGRSVADLNGGLVDNPLAFGGDDPSFQIFLPTRPADSSMHNELRDQANVANGVCTEEDWISLRLGGGAGGNNGDAPTQNGLNSRHQIPTREGAKNTLDDTASLLLGMNDVRSDRARRQRSDSPFSFPRQKRSVRPRLYLSIDSDSE

SEQ ID NO: 407 - DNA, 1502 bp, Sorghum bicolor
cgctcccgctggcagcgccaaaacccatggcctctcgcacgaccaccccaccttctcctgcccacctccgcctccatgccgcgtccctcttcgcagctcctcccactccctcacgcgcgtgccccgcgatgctgtggtcaactcacaggccgtagacctgtctgctcccgcaaacgatgaagtcgcgaggcgtgaccgcacatgcctgatgcctccaccacccaagtcctccacccatccgccgacggtggaatagggtaacaaaaaaaagccgtcgaggacggcgccgcagccaagctcacgcaggatgcgcagcaacgagctccgactcgccctccaggcgggattcgaccccgccaggtgcggctcttgttcctagatttttacttcctgggatgaactggtgtcattgagcaaatgtgtctgcactttcgggtggaagaataactttctgcagggccaagcgccgccaaaaggcatcagcagagaagaaggcgaccgtggccgcaagggataagcagttacattcaggcgtattttaagctcgagactttgaagcaagaccttaaatttcgagtctgcaaattctcaaactaatccagcttcaactaatctgcattcctccctccgcccctagacgaggggaagcaagctacataaggaacatatccggccttcaagtatttatttcaacctcaatcaggccttgaaatttgaatgtgtaaggatctgctgctaaactattttactgctagcaagaccacaaattgtgaatttcattcagaacagactttccaactttcccgagcagatagagaaacagtccagagacaagaatatgatctccaggtttggtgcatccttataaatgacaaagtccagttcaggatgcaatggcctcaatatgcagaattgcaagtgaacggtattcctgtacgagtaatgaccaggcccggttctcagttactagggataaatgggcgggatgatgggccactggtaaccacatgcagtagagaagggatcaacaaaattagcttatctagagtggatgctcgaaccttttgctttggagttcgaattgttaggaggactgttcctcaggtgcattgagcattctaacagtctgcaactttcattcagaacagactgcagctgccccagccccaggtgctctcctccgaatgcatccgcaaacttccaggtcgtagccaccccagcccccaggtgctctcctccctcctcgccccaatcagctggtgctccttcgtcctccttgccccattcccgcaggctgcaggtcgcaggtgctccttcgtcctctcatggcaacaggatctgaagaggcgacgactcgagaggagcggaggtcgtgagaaaacaacttaagttcttacaagttacaacatcatctcttacgtgcgtccatgtgcttctttgtggaaccattgataacttctaaaatcagtaatgatgctagacttttctggtaaaaaaaaaaa

SEQ ID NO: 408 - protein, 131 aa, Sorghum bicolor
MCKDLLLNYFTASKTTNCEFHSEQTFQLSRADRETVQRQEYDLQVWCILINDKVQFRMQWPQYAELQVNGIPVRVMTRPGSQLLGINGRDDGPLVTTCSREGINKISLSRVDARTFCFGVRIVRRTVPQVH

SEQ ID NO: 409 - protein, 35 aa, Artificial sequence
  SAP domain
LSYFRIKELKDVLTQLGLSKQGKKQELVDRILTLL

SEQ ID NO: 410 - protein, 53 aa, Artificial sequence
  PHD Zn finger domain
VCGNSLETDSMIQCEDPRCHVWQHVGCVILPDKPMDGNPPLPESFYCEICRLT

SEQ ID NO: 411 - protein, 50 aa, Artificial sequence
  MIZ Sp-RING Zn finger domain
VNLRCPMSGSRIKVAGRFLPCVHMGCFDLDVFVELNQRSRKWQCPICLKN

SEQ ID NO: 412 - protein, 14 aa, Artificial sequence
  motif 13
FYCEICRLTRADPF

SEQ ID NO: 413 - protein, 11 aa, Artificial sequence
  motif 14
FCFGVRLVKRR

SEQ ID NO: 414 - protein, 20 aa, Artificial sequence
  motif 15
SDIEVVADFFGVNLRCPMSG

SEQ ID NO: 415 - protein, 11 aa, Artificial sequence
  motif 16
RKWQCPICLKN

SEQ ID NO: 416 - protein, 12 aa, Artificial sequence
  motif 17
VIVLSDSDDEND

SEQ ID NO: 417 - protein, 8 aa, Artificial sequence
  motif 18
PSLQIFLP

SEQ ID NO: 418 - DNA, 2194 bp, Oryza sativa; identical to SEQ ID NO: 264

SEQ ID NO: 419 - DNA, 56 bp, Artificial sequence
  primer: prm13568
ggggacaagtttgtacaaaaaagcaggcttaaacaatggatttggaagctaattgt

SEQ ID NO: 420 - DNA, 50 bp, Artificial sequence
  primer: prm13569
ggggaccactttgtacaagaaagctgggtcaacagaacagacaaatcagg

SEQ ID NO: 421 - DNA, 471 bp, Medicago truncatula
atggcttcatcaagtggaacatcttcaggttcatctctactacaaaactcaggttcagaagaagatttacaggctttgatggatcaaagaaagaggaagaggatgatatcgaatcgcgaatcggcaaggcggtctaggatgaggaaacagaagcacttggatgatcttgtgtcacaagtttctaagctaaggaaagagaatcaagaaatactcacaagtgttaacatcaccactcaaaagtatttgagtgttgaagctgaaaattcagtgttgagggctcagatgggtgaattgagcaacaggttggaatctttgaatgaaattgttggtgccttgaattcaagcaatggagtttttggagcatcaaatgcttttgttgagcaaaataatggtttcttcttcaactctttgaataatatgtcttatatgaaccagcctattatggcttctgcagatatactgcagtactga

SEQ ID NO: 422 - protein, 156 aa, Medicago truncatula
MASSSGTSSGSSLLQNSGSEEDLQALMDQRKRKRMISNRESARRSRMRKQKHLDDLVSQVSKLRKENQEILTSVNITTQKYLSVEAENSVLRAQMGELSNRLESLNEIVGALNSSNGVFGASNAFVEQNNGFFFNSLNNMSYMNQPIMASADILQY

SEQ ID NO: 423 - DNA, 522 bp, Arabidopsis thaliana
atgaataataaaactgaaatgggatcttccacaagtggaaattgctcgtcggtttcaaccactggtttagctaactccggttcagaatctgatctccggcaacgtgatctaatcgacgagcggaagagaaagaggaaacagtcgaacagagaatctgcgaggaggtcgaggatgaggaagcagaagcatttggatgatctcactgctcaggtgactcatctacgtaaagaaaacgctcagatcgtcgccggaatcgccgtcacgacgcagcactacgtcactatcgaggcggagaacgacattctcagagctcaggttcttgaacttaaccaccgtctccaatctcttaacgagatcgttgatttcgtcgaatcttcttcttcaggattcggtatggagaccggtcagggattattcgacggtggattattcgacggcgtgatgaatcctatgaatctagggttttataatcaaccaatcatggcttctgcttctactgctggtgatgttttcaactgttag

SEQ ID NO: 424 - protein, 173 aa, Arabidopsis thaliana
MNNKTEMGSSTSGNCSSVSTTGLANSGSESDLRQRDLIDERKRKRKQSNRESARRSRMRKQKHLDDLTAQVTHLRKENAQIVAGIAVTTQHYVTIEAENDILRAQVLELNHRLQSLNEIVDFVESSSSGFGMETGQGLFDGGLFDGVMNPMNLGFYNQPIMASASTAGDVFNC

SEQ ID NO: 425 - DNA, 516 bp, Arabidopsis thaliana
atggcgtcatctagcagcacataccggagctcaagctcttccgacggtggtattaataacccgtcggactccgtcgtcaccgtcgacgaacgcaaacgtaaaagaatgttatcgaacagagaatctgcacgtaggtcaagggtgcgtaaacaggaacacgttgatgatctaacggctcagatcaatcagctatcaaacgacaaccgtcagatcttgaacagcctcaccgtaacatctcagctttacatgaagatccaagccgagaactctgttctcaccgctcagatggaggagcttagcaccagactccaatctctcaacgagatcgttgatcttgttcaatccaacggtgcaggatttggtgttgaccagatcgacggctgtggttttgatgatcgtacggttgggatcgacggatattacgatgatatgaatatgatgagtaatgttaatcattggggtggttcggtttacactaaccaacccattatggctaatgatatcaatatgtattga

SEQ ID NO: 426 - protein, 171 aa, Arabidopsis thaliana
MASSSSTYRSSSSSDGGINNPSDSVVTVDERKRKRMLSNRESARRSRVRKQEHVDDLTAQINQLSNDNRQILNSLTVTSQLYMKIQAENSVLTAQMEELSTRLQSLNEIVDLVQSNGAGFGVDQIDGCGFDDRTVGIDGYYDDMNMMSNVNHWGGSVYTNQPIMANDINMY

SEQ ID NO: 427 - DNA, 516 bp, Arabidopsis thaliana
atggcgtcatctagcagcacataccggagctcaagctcttccgacggtggtaataataacccgtcggactccgtcgtcaccgtcgacgaacgaaaacgtaaaagaatgttatcgaacagagaatctgcacgtaggtcaaggatgcgtaaacagaaacacgttgatgatctaacggctcagatcaatcagctatcaaacgacaaccgtcagatcttgaacagcctcaccgtaacatctcagctttacatgaagatccaagccgagaactctgttctcaccgctcagatggaggagcttagcaccagactccaatctctcaacgagatcgttgatcttgttcaatccaacggtgcaggatttggtgttgaccagatcgacggctgtggttttgatgatcgtacggttgggatcgacggatattacgatgatatgaatatgatgagtaatgttaatcattggggtggttcggtttacactaaccaacccattatggctaatgatatcaatatgtattga

SEQ ID NO: 428 - protein, 171 aa, Arabidopsis thaliana
MASSSSTYRSSSSSDGGNNNPSDSVVTVDERKRKRMLSNRESARRSRMRKQKHVDDLTAQINQLSNDNRQILNSLTVTSQLYMKIQAENSVLTAQMEELSTRLQSLNEIVDLVQSNGAGFGVDQIDGCGFDDRTVGIDGYYDDMNMMSNVNHWGGSVYTNQPIMANDINMY

SEQ ID NO: 429 - DNA, 480 bp, Arabidopsis thaliana
atggaatcgtcgtcgtcgggaacaacttcgtcgacgattcaaacgtcgtcaggatcggaggagagtctcatggagcagaggaaacgtaaacggatgctctcaaaccgtgaatctgcaaggagatcaagaatgaagaaacaaaagctcctagacgatctaacggctcaggttaatcatctgaaaaaagagaacacggagatcgtgacaagtgtcagcatcacaacgcaacactacctaaccgttgaagcagagaactctgttctcagagctcagcttgatgaacttaaccacaggctccaatctctcaacgacatcatcgagttcctcgacagtagcaacaacaacaacaacaacaacatgggcatgtgttcgaaccctctggttggtttggagtgtgatgatttcttcgtgaatcagatgaacatgtcttatattatgaaccagcctctcatggcgtcttctgatgctttaatgtattaa

SEQ ID NO: 430 - protein, 159 aa, Arabidopsis thaliana
MESSSSGTTSSTIQTSSGSEESLMEQRKRKRMLSNRESARRSRMKKQKLLDDLTAQVNHLKKENTEIVTSVSITTQHYLTVEAENSVLRAQLDELNHRLQSLNDIIEFLDSSNNNNNNNMGMCSNPLVGLECDDFFVNQMNMSYIMNQPLMASSDALMY

SEQ ID NO: 431 - DNA, 429 bp, Brassica napus
atggatccgtcgtcgtcgggatcggaagagagtctcatggagcagaggaagaggaagaggatgctctcgaaccgtgaatcagcgagaagatcgaggatgaagaaacagaagctcctcgacgatctaacggctcaggtgaaccggcttaaagaacagaacaacgagatcttgacaagtgtcagcatcacgacgcagcactacttaaccgtcgaagcagagaactctgttctcaaagctcagcttgatgagctcagccacaggcttgaatctctcaacggcatcatcgagttcctcgagagcaccaacgggacttgtccgaaccctctgactggtccagagcctgatgattttctcgtgaaccagatgaatatgaacatgttttgtatgaaccagcctctcatggcatcttcggatgcgttactgtattag

SEQ ID NO: 432 - protein, 142 aa, Brassica napus
MDPSSSGSEESLMEQRKRKRMLSNRESARRSRMKKQKLLDDLTAQVNRLKEQNNEILTSVSITTQHYLTVEAENSVLKAQLDELSHRLESLNGIIEFLESTNGTCPNPLTGPEPDDFLVNQMNMNMFCMNQPLMASSDALLY

SEQ ID NO: 433 - DNA, 462 bp, Brassica napus
atggactcgtcgtcgtctggaacaacttcttcgacgattcaaacgtcgtcaggacctgaggagaatctcatggagcagagaaaacggaagaggatgctctcaaaccgtgaatcagcgaggagatcaagaaagaagaaacagaagcttcttgacgatctaacggctcaggttaatcagcttaggaaagagaacagcgagatcgtgacaagtgtcagcatcacaacgcaacactatttaaccgtcgaagcagagaactctgttctcagagctcagctcgatgaactcagccacaggctcgaatctctcaacgacatcatcggtttccttgacaataccaacgggatctgttcgaacactctgtctggtccagagtctgatgatttcctcgtgagtcagtttaatatgaacatgttttatatgaaccagccactcatggcatcttctgatgcgttactgtattag

SEQ ID NO: 434 - protein, 153 aa, Brassica napus
MDSSSSGTTSSTIQTSSGPEENLMEQRKRKRMLSNRESARRSRKKKQKLLDDLTAQVNQLRKENSEIVTSVSITTQHYLTVEAENSVLRAQLDELSHRLESLNDIIGFLDNTNGICSNTLSGPESDDFLVSQFNMNMFYMNQPLMASSDALLY

SEQ ID NO: 435 - DNA, 498 bp, Brassica napus
atgaacaaaactgaaatgggatctcccgcgagcggaaactgctcgtccggtttacaaaactacggttctgagtcggatgagcggaagaggaagaggaaagagtcgaacagagagtcggcgaggaggtcaaggatgaggaagcagaagcatttggatgatctaacggctcaaatcgcgcatttcctggaagaaaacagccatatcgtcgccgggatctccgtcacgacgcagcaatacgttaccatcgagggggagaactccgttctcagagctcagtttctggagctcaaccagcgactaaattccctcaacgagattgtggaaatcgccggaggattttggatggaaacgggtcagggaggaggagtgatcggttacggaggcggtggaggagggttttacgacggagtgatgaatcctctcaatctagggttttataaccaaactctcatggcttctgcttctactgtttctgctgatgttttcaactgttgttaa

SEQ ID NO: 436 - protein, 165 aa, Brassica napus
MNKTEMGSPASGNCSSGLQNYGSESDERKRKRKESNRESARRSRMRKQKHLDDLTAQIAHFLEENSHIVAGISVTTQQYVTIEGENSVLRAQFLELNQRLNSLNEIVEIAGGFWMETGQGGGVIGYGGGGGGFYDGVMNPLNLGFYNQTLMASASTVSADVFNCC

SEQ ID NO: 437 - DNA, 513 bp, Capsicum annuum
atggcttcttcaagtggtacatcatcaggttcatcatttcttcagaactcagggtcagaagaagatcttcagctgttaatggatcagaggaagagaaaaagaatgatatcaaacagggaatcagcaagaagatcaagaatgagaaagcaaaaacacttaaatgatttgatggcccaagtatcaacactaagaaaagagaatgaccagatattgacaagtatgaatgtcacaacacagcattatcttaatgttgaggctgaaaattcaatcttgagagctcaattaagtgaacttagccataggcttgagtcacttaatgaaatcattgcatatatggatgccaacaacaacaacaacagttgtagtaatggtcttgctatggaccacaatgagccatatagcttcaattttgcacaaagtgacactgtggttgatgggttcaacatgaccaattcctggaactacttctgttctaatcagcccattatgactgcacatgtcttgcagtactga

SEQ ID NO: 438 - protein, 170 aa, Capsicum annuum
MASSSGTSSGSSFLQNSGSEEDLQLLMDQRKRKRMISNRESARRSRMRKQKHLNDLMAQVSTLRKENDQILTSMNVTTQHYLNVEAENSILRAQLSELSHRLESLNEIIAYMDANNNNNSCSNGLAMDHNEPYSFNFAQSDTVVDGFNMTNSWNYFCSNQPIMTAHVLQY

SEQ ID NO: 439 - DNA, 504 bp, Capsicum chinense
atggcttcttcaagtggtacatcatcaggttcatcatttcttcagaactcagggtcagaagaagatcttcagctgttaatggatcagaggaagagaaaaagaatgatatcaaacagggaatcagcaagaagatcaagaatgagaaagcaaaaacacttggatgatttgatggcccaagtatcaacactaagaaaagagaatgaccagatattgacgagtatgaatgtcacaacacaacattatcttaatgttgaggctgaaaattcaatcttgagagctcaattaagtgaacttagccataggcttgagtcacttaatgaaatcattgcatatatggatgccaacaacagttgtagtaatggtcttgctatggaccacaatgagccatatagcttcaattttgcacaaagtgacactgtggttgatgggttcaacatgaccaattcttggaactacttctgttctaatcagcccattatgactgcacatgtcttgcagtactga

SEQ ID NO: 440 - protein, 167 aa, Capsicum chinense
MASSSGTSSGSSFLQNSGSEEDLQLLMDQRKRKRMISNRESARRSRMRKQKHLDDLMAQVSTLRKENDQILTSMNVTTQHYLNVEAENSILRAQLSELSHRLESLNEIIAYMDANNSCSNGLAMDHNEPYSFNFAQSDTVVDGFNMTNSWNYFCSNQPIMTAHVLQY

SEQ ID NO: 441 - DNA, 513 bp, Capsicum chinense
atggcttcttcaagtggtacatcatcaggttcatcatttcttcagaactcagggtcagaagaagatcttcagctgttaatggatcagaggaagagaaaaagaatgatatcaaacagggaatcagcaagaagatcaagaatgagaaagcaaaaacacttagatgatttgatggcccaagtatcaacactaagaaaagagaatgaccagatattgacaagtatgaatgtcacaacacagcattatcttaatgttgaggctgaaaattcaatcttgagagctcaattaagtgaacttagccataggcttgagtcacttaatgaaatcattgcatatatggatgccaacaacaacaacaacagttgtagtaatggtcttgctatggaccacaatgagccatatagcttcaattttgcacaaagtgacactgtggttgatgggttcaacatgaccaattcctggaactacttctgttctaatcagcccattatgactgcacatgtcttgcagtactga

SEQ ID NO: 442 - protein, 170 aa, Capsicum chinense
MASSSGTSSGSSFLQNSGSEEDLQLLMDQRKRKRMISNRESARRSRMRKQKHLDDLMAQVSTLRKENDQILTSMNVTTQHYLNVEAENSILRAQLSELSHRLESLNEIIAYMDANNNNNSCSNGLAMDHNEPYSFNFAQSDTVVDGFNMTNSWNYFCSNQPIMTAHVLQY

SEQ ID NO: 443 - DNA, 507 bp, Glycine max
atggcttctcctggtggaagtgggacctattcatctggttcaagttctcttcaaaactctggttctgagggagacagagacatcatggaacagaggaagaggaagagaatgctatccaatagggaatcggcacgtagatcgaggatgaggaaacagcagcacctggaaggtctcagtgcccaattggatcagctaaaaaaggagaacacccaaatgaacacaaacataggcatcagcacgcagctgtacctcaacgtggaagctgagaacgcgattctgagggctcaaatggaagaactgagcaagagattgaactctctgaacgaaatgataagtttgattaactccaccaccaccaccaacaactgcttgatgttcgatgaggcacaggagactacgactcagttgttcaatgattgtggcttcatggatgcttggaattacggaataccactcaatcaacaaatcatggcttacgctgacaatgacatgttgatgatgtattga

SEQ ID NO: 444 - protein, 168 aa, Glycine max
MASPGGSGTYSSGSSSLQNSGSEGDRDIMEQRKRKRMLSNRESARRSRMRKQQHLEGLSAQLDQLKKENTQMNTNIGISTQLYLNVEAENAILRAQMEELSKRLNSLNEMISLINSTTTTNNCLMFDEAQETTTQLFNDCGFMDAWNYGIPLNQQIMAYADNDMLMMY

SEQ ID NO: 445 - DNA, 468 bp, Glycine max
atggcttgttcaagtggaacatcttcaggggcgacgtcgtcgatgcttcaaaataactcaggttcggaggaggagctgcaggcactgatggagcagaggaagaggaagagaatgatatcgaaccgcgaatcggctaggcgatctcgaatgaggaagcagaagcacttggatgatctagcatcgcaggtgactcagctcaggaacgagaaccaccagattctcacatcggtgaacctcactacccagaagtacttggcggttgaggctgagaactctgttttgagagcacaagtgaacgaactcagccactggttggagtctctgaacgagatcatccacttcttgaatgccactgatggtggtccaccaccaccaccaagctccttctttgagcccgatgctaccttcttcaacaaggcttatctgagccagccgattatggcttcagcagacatgtggcaggactga

SEQ ID NO: 446 - protein, 155 aa, Glycine max
MACSSGTSSGATSSMLQNNSGSEEELQALMEQRKRKRMISNRESARRSRMRKQKHLDDLASQVTQLRNENHQILTSVNLTTQKYLAVEAENSVLRAQVNELSHWLESLNEIIHFLNATDGGPPPPPSSFFEPDATFFNKAYLSQPIMASADMWQD

SEQ ID NO: 447 - DNA, 417 bp, Glycine max
atgactatggcttgttcaagtggaacatcttcagggacgtcgtcggagctgcagggtatgatggatcagaggaagaggaagagaatgatatcgaaccgcgaatcggcaaggcgatctcgaatgaggaagcagaagcacttggatgatctagcatcgcagctgactcagctcaggagccagaatcagcagcttctcacgtctgtgaacctcaccagccacaagtacttggcggtggaggctgagaactctgttttgagagcacaagtgaacgagctcagccacaggttggactctctcaaccagatcatccacttgttgaatttctttgagcccgatgctagtactagtaccttcttcaacaaccctttcaatttcagcctcccgattatggcttcagcagacatgttgcagtactga

SEQ ID NO: 448 - protein, 138 aa, Glycine max
MTMACSSGTSSGTSSELQGMMDQRKRKRMISNRESARRSRMRKQKHLDDLASQLTQLRSQNQQLLTSVNLTSHKYLAVEAENSVLRAQVNELSHRLDSLNQIIHLLNFFEPDASTSTFFNNPFNFSLPIMASADMLQY

SEQ ID NO: 449 - DNA, 483 bp, Glycine max
atggcttcctcaagtggaacatcttcagggtcatctctgcttcagaactctggttctgaggaggatttgcaggcggtgatggatcagagaaagaggaagagaatgatatcaaaccgcgaatctgcacggcgatctcgcatgaggaagcagaagcacttggacgatcttgtttcccaagtggctcagctcagaaaagagaaccaacaaatactcacaagcgtcaacatcaccacgcaacagtacctgagcgttgaggctgagaactcggtgcttagggctcaggtgggtgagcttagtcacaggttagagtctctgaatgagatcgttgacgtgttgaatgccaccactgtggcgggttttggagcagcagcaacatcgagcaccttcgttgagccaattaataataatagcttcttcaacccgttgaatatggggtatctgaaccaccctattatggcttctgcggatatattgcagtattga

SEQ ID NO: 450 - protein, 160 aa, Glycine max
MASSSGTSSGSSLLQNSGSEEDLQAVMDQRKRKRMISNRESARRSRMRKQKHLDDLVSQVAQLRKENQQILTSVNITTQQYLSVEAENSVLRAQVGELSHRLESLNEIVDVLNATTVAGFGAAATSSTFVEPINNNSFFNPLNMGYLNHPIMASADILQY

SEQ ID NO: 451 - DNA, 465 bp, Glycine max
atgtccatgtccatggcctcatcaagtggaaactcctctattagcacaaaatctcagagctcagggtctgagggtgatttgcaggtcgtgataacagacgagaggaagaacaagaggaagcaatcgaatcgtgaatcggcgagaagatctcggatgcgaaagcgtaaccacttggaccaactcactaagcagctctcacagctcgcaaagaacaacggcgaaatcctcgccaccatagacatcaccacgcagcactatctgaacgttgaggcagagaattccattctaagggcccaaatgggtgagcttagccaacggctccaatcgctcaacgacatcgtccacgacatcatcatcaacacaaccaccacctacgaaagggactgttatctaacaagcgcacaaaatttcaccaccaccacctacacgctctgtcttaaccaacaagccgtttttcagtggtga

SEQ ID NO: 452 - protein, 154 aa, Glycine max
MSMSMASSSGNSSISTKSQSSGSEGDLQVVITDERKNKRKQSNRESARRSRMRKRNHLDQLTKQLSQLAKNNGEILATIDITTQHYLNVEAENSILRAQMGELSQRLQSLNDIVHDIIINTTTTYERDCYLTSAQNFTTTTYTLCLNQQAVFQW

SEQ ID NO: 453 - DNA, 501 bp, Glycine max
atggcttgttcaagtggaacatcttcagggtcattatctctgcttcagaactctggttctgaggaagatttgcaggcgatgatggaagatcagagaaagaggaagagaatgatatcaaaccgcgaatctgcacgccgatctcgcatgaggaagcagaagcacttggacgatcttgtttcccaagtggctcagctcagaaaagagaaccaacaaatactcacaagcgtcaacatcaccacgcaacagtacttaagcgttgaggctgagaactcggtgcttagggctcaggtgggtgagttgagtcacaggttggagtctctgaacgagatcgttgacgtgttgaatgccaccaccactgtggcgggttttggagcagcagcatcgagcaccttcgttgagccaatgaataataataataatagcttcttcaacttcaacccgttgaatatggggtatctgaaccagcctattatggcttctgcagacatattgcagtattga

SEQ ID NO: 454 - protein, 166 aa, Glycine max
MACSSGTSSGSLSLLQNSGSEEDLQAMMEDQRKRKRMISNRESARRSRMRKQKHLDDLVSQVAQLRKENQQILTSVNITTQQYLSVEAENSVLRAQVGELSHRLESLNEIVDVLNATTTVAGFGAAASSTFVEPMNNNNNSFFNFNPLNMGYLNQPIMASADILQY

SEQ ID NO: 455 - DNA, 699 bp, Hordeum vulgare
atggcgtcctcgagcgggagcgggagcacgggctcgctctcgacggcggcggccatggccatggcggccgcgtcggggacggaggaggacatgcgggcactcatggagcagcgccgggcgaagcggatgctctccaaccgggagtcggcgcgccgctcgcggatgcgcaagcagcgccacctcgacgacctcgccgcgcaggcggcccacctgcgccgcgagaacgcgcacgtcgccgccgcgctcgggctcacagcgcggggcctcctcgccgtcgacgccgagaacgccgtcctccgcacccaggccgccgagctcgccgcgcgcctccagtcgctcaacgacatcatcgcctgcatgagcgccagaacaacaccgcagccgccgtcgcgctcaccgtcgccgcggcagcaccgccaccgccaccgacccgttcggcttcgacggcccgtcgctcgacgactacctctgcagatcctcccccgagatgttcatgttcccagccctccaaagctagcacccacggccatggcatggcagacgacagcagccagcacaagatcgagcgagcgagcgcacgaagaaagatcatccatccatcttttttccctgatgcttctggtgtttcaggttaattacgtactgaagatttggagggccgtggagtttttactgcacctaactagaaaagctagctag

SEQ ID NO: 456 - protein, 232 aa, Hordeum vulgare
MASSSGSGSTGSLSTAAAMAMAAASGTEEDMRALMEQRRAKRMLSNRESARRSRMRKQRHLDDLAAQAAHLRRENAHVAAALGLTARGLLAVDAENAVLRTQAAELAARLQSLNDIIACMSARTTPQPPSRSPSPRQHRHRHRPVRLRRPVARRLPLQILPRDVHVPSPPKLAPTAMAWQTTAASTRSSERAHEERSSIHLFSLMLLVFQVNYVLKIWRAVEFLLHLTRKAS

SEQ ID NO: 457 - DNA, 294 bp, Medicago truncatula
atggcttcatcaagtggaacatcttcaggttcatctctactacaaaactcaggttcagaagaagatttacaggctttgatggatcaaagaaagaggaagaggatgatatcgaatcgcgaatcggcaaggcggtctaggatgaggaaacagaagcacttggatgatcttgtgtcacaagtttctaagctaaggaaagagaatcaagaaatactcacaagtgttaacatcaccactcaaaagtatttgagtgttgaagctgaaaattcagtgttgagggctcagatgggtgattga

SEQ ID NO: 458 - protein, 97 aa, Medicago truncatula
MASSSGTSSGSSLLQNSGSEEDLQALMDQRKRKRMISNRESARRSRMRKQKHLDDLVSQVSKLRKENQEILTSVNITTQKYLSVEAENSVLRAQMGD

SEQ ID NO: 459 - DNA, 513 bp, Nicotiana tabacum
atggcttcatcaagtggaacatcatcagggtcatcattatttcttcaaaactcaggctcagaagaagatcttcagcaattagtggatcaaaggaagaggaagagaatgatatcaaacagagaatcagctcgaagatcaaggatgagaaaacagaaacatttggatgatttaatggctcaagttgcaacactaagaaaagaaaataaccagattttgacaagtatgaatgttaccacacaacattatcttaatgttgaggctgaaaattcaatcttgagagctcaattagctgaattaaatcacaggcttgagtcactcaatgaaattattgctttcttggatgccaacaacaattgtaatggtcttgccaatatggaccataatcaagaagagccttatagcttcaattttgcacaaaatgaacctatggttgatgggttcaacatgaccaattcttggaattatctttgtgccaatcagcctattatgactgcagatgttttgcagtactga

SEQ ID NO: 460 - protein, 170 aa, Nicotiana tabacum
MASSSGTSSGSSLFLQNSGSEEDLQQLVDQRKRKRMISNRESARRSRMRKQKHLDDLMAQVATLRKENNQILTSMNVTTQHYLNVEAENSILRAQLAELNHRLESLNEIIAFLDANNNCNGLANMDHNQEEPYSFNFAQNEPMVDGFNMTNSWNYLCANQPIMTADVLQY

SEQ ID NO: 461 - DNA, 492 bp, Oryza sativa
atggcatcgtcaagcgggagcggggggagcgcggtgtcggcggcgacggcggcggcgggggggtcgtcgtcggcggcggaggaggagctgagggcgcttatggagcagcggcgggcgaagaggatgctgtcgaacagggagtcggcgcggcggtcgcggatgcggaagcagcgccacctcgacgacctcaccgcgcaggtggcgcacctccgccgcgagaacgcgcacgtcgccaccgcgctcggcctcaccacccagggcctcctcgccgtcgacgccgagaacgccgtcctccgcacccaggccgccgagctcgccgcgcgcctcgcctccctcaacgacatcctctcctgcatcaacaccaacggcgccgccgccgccgccgccgccgccctcaccgtcgccgccgccaccgacccgctcctcgccttcgactccgccgccttcgacgacctcttcagatcctcccccgagctgttccagctttgctag

SEQ ID NO: 462 - protein, 163 aa, Oryza sativa
MASSSGSGGSAVSAATAAAGGSSSAAEEELRALMEQRRAKRMLSNRESARRSRMRKQRHLDDLTAQVAHLRRENAHVATALGLTTQGLLAVDAENAVLRTQAAELAARLASLNDILSCINTNGAAAAAAAALTVAAATDPLLAFDSAAFDDLFRSSPELFQLC

SEQ ID NO: 463 - DNA, 471 bp, Populus trichocarpa
atggcatcctctagtgggaattcctcaggttccactcagctgcaaaactcgggctctgaagagcaggtggtgttggtggatcaaaggaaaaggaagagaatgctgtcaaatagagaatctgcaaggagatccaggatgagaaaacagaagtacttgggtgatctaatggctcaagtggcacagctaaggacggacaataaccaaatccttacaaccatcaatgtcacaacacagcacttcttgaacgttgaggccgagaattctatcttaagggcacaaatgatggaactgaaccatagacttgattctctcaatgagatcctcaattatatcaacacaagcaatgggatttttgaaattgatcatcatgaggatctccaaactagtgcagatcatggcttcatgaatccattaaatttgatcttacttaaccaacccatcatggcatctccagatttgtttcagtattga

SEQ ID NO: 464 - protein, 156 aa, Populus trichocarpa
MASSSGNSSGSTQLQNSGSEEQVVLVDQRKRKRMLSNRESARRSRMRKQKYLGDLMAQVAQLRTDNNQILTTINVTTQHFLNVEAENSILRAQMMELNHRLDSLNEILNYINTSNGIFEIDHHEDLQTSADHGFMNPLNLILLNQPIMASPDLFQY

SEQ ID NO: 465 - DNA, 468 bp, Populus trichocarpa
atggcatcctccagtggggattcctcaggtttcactcagctccaaaactcaggctctgaagagaatacgcagatgatgttggtggatcaaaggaaaaggaagagaatgcaatcaaacagagaatctgcaaggagatccaggatgaaaaaacagaagcacttggatgatttaatggcccaagtgacacagctaaggaaggacaataaccaaatccttacaaccatcaatgtcacaacacagcactacttgaatgttgaagccgagaattctattctaagggcacaaatgatggaactgaaccatagacttgattctcttaacgagatcctcaactatatcaacacgagtaatgggatttttgaaaatgatcatcacgaggatctccctgatcatagcttcatgaatccatcaaatctgttctatcttaaccagcccatcatggcatccccagatttgtttcagtattga

SEQ ID NO: 466 - protein, 155 aa, Populus trichocarpa
MASSSGDSSGFTQLQNSGSEENTQMMLVDQRKRKRMQSNRESARRSRMKKQKHLDDLMAQVTQLRKDNNQILTTINVTTQHYLNVEAENSILRAQMMELNHRLDSLNEILNYINTSNGIFENDHHEDLPDHSFMNPSNLFYLNQPIMASPDLFQY

SEQ ID NO: 467 - DNA, 495 bp, Populus trichocarpa
atggcctcttctagtggggcatcttcagggtcaacaaccatgttgaggaactcaagttctgaagaggatctgcagcaagttatggacctaaggaagcgtaaaaggatgctgtctaatagagaatctgcaagaagatccagagtgaagaaacagaaacacctggatgatctcatgggacagcttggtcaactcagcaaagaaaataacgagattctgaaaaggatgaatgttacctctcagctttacatgaatatcgaagctgagaactctatcctcagagcccaaatggctgagctgagccacagattgaattctctcaatgaaatcattgaatacgtcaacttttgcagtggcacttttgaacgtcatgaggatgctgctgcccccactactggtgcttttggtcatcagctcgttgatgattttttcatgaatccgtggaataatgctgatttccatttgaataaacctatcatggacatgatcatgtactaa

SEQ ID NO: 468 - protein, 164 aa, Populus trichocarpa
MASSSGASSGSTTMLRNSSSEEDLQQVMDLRKRKRMLSNRESARRSRVKKQKHLDDLMGQLGQLSKENNEILKRMNVTSQLYMNIEAENSILRAQMAELSHRLNSLNEIIEYVNFCSGTFERHEDAAAPTTGAFGHQLVDDFFMNPWNNADFHLNKPIMDMIMY

SEQ ID NO: 469 - DNA, 468 bp, Populus trichocarpa
atggcttcctctagtggaacatcttcgggatcatctttgattcaaaactcaggttcggaggaggatttgcaggcattgatggatcagaggaagagaaagagaatgatatcaaatcgcgaatcggcgaggaggtctagaatgagaaaacagaagcatttggatgatctaatggctcaagtgtctcaattgaggaaggagaatcaccagattattacaggcatcaatatcacaactcagcgttacttgagtgttgaggctgataactcaatcctaagagttcaaataagcgagctcagcaatagattggagtctttgaatgagataatcggttccttgaattcaaacaatggtgtttttggagactcgatcaccttcaatgaaccagcagctgacagcttcttgaacccatggaacatggcctacctgaatcagcctataatggcgtctgcagagatgtttcattactga

SEQ ID NO: 470 - protein, 155 aa, Populus trichocarpa
MASSSGTSSGSSLIQNSGSEEDLQALMDQRKRKRMISNRESARRSRMRKQKHLDDLMAQVSQLRKENHQIITGINITTQRYLSVEADNSILRVQISELSNRLESLNEIIGSLNSNNGVFGDSITFNEPAADSFLNPWNMAYLNQPIMASAEMFHY

SEQ ID NO: 471 - DNA, 525 bp, Petroselinum crispum
atggcttcttctggtgggaattcctcaggctcaactcaaaagcttcaaaactccgggtctgaaggagacctgatggatcagagaaaacggaagagaatgcagtcgaatcgcgaatcagcgagacgatcaagacagcgaaaacagaaccatcttgatgaactaatggcacaggctgctcagctccgaaaagagaacaatcagatcatcacaactaccaacttgaccactcaacaatttgttaaagttgaagctgaaaattcagtgttgagggctcaaatggatgaactcactcagagactccagtccctgaatgatattcttcattatatcaacaccacaactacagcagcagcagcagcaacagcagcagccactacaggcattgatggtgtttttgaaatggacaatctttttggacttgatgatcatcagagtagttatatgaataataataataataataataattcatggaatatgatgtatcctaaccaaccaatcatggctgatatgtttatgtactaa

SEQ ID NO: 472 - protein, 174 aa, Petroselinum crispum
MASSGGNSSGSTQKLQNSGSEGDLMDQRKRKRMQSNRESARRSRQRKQNHLDELMAQAAQLRKENNQIITTTNLTTQQFVKVEAENSVLRAQMDELTQRLQSLNDILHYINTTTTAAAAATAAATTGIDGVFEMDNLFGLDDHQSSYMNNNNNNNNSWNMMYPNQPIMADMFMY

SEQ ID NO: 473 - DNA, 468 bp, Populus trichocarpa
atggcttcgtccagtggaacatcttcaggttcatctttgattcagaactcgggttctgaagagaatttgcaggcattgatggatcagaggaagaggaagagaatgatatcgaatcgtgaatcggcgaggaggtctagaatgagaaaacagaagcatttggatgatctggtggctcaagtggctcaattgaaaaaggagaatcaccagattattaccagcatcaatatcaccactcaacattatttgaacgtggaggccgataactcaatcttgagagctcaagttagtgagctcagccacagattggagtttttgaacggaatcattagtttattgaattcaagcaatggcctctttggagattcaagcatctttaatgagccagcagccgacagcttcttgaacccattcaacatgtcctatctgaatcagccgataagtgcctctgcagatatgtttcaatactga

SEQ ID NO: 474 - protein, 155 aa, Populus trichocarpa
MASSSGTSSGSSLIQNSGSEENLQALMDQRKRKRMISNRESARRSRMRKQKHLDDLVAQVAQLKKENHQIITSINITTQHYLNVEADNSILRAQVSELSHRLEFLNGIISLLNSSNGLFGDSSIFNEPAADSFLNPFNMSYLNQPISASADMFQY

SEQ ID NO: 475 - DNA, 516 bp, Sorghum bicolor
atggcttcctccagcgggagcgggagctcgggctctctgtcggcggcgacggcggcgctggccgcggcggcgggcacggaggaggagctgcgcgcgctcatggagcagcggcgcgccaagcggatgctgtccaaccgcgagtccgcgcggcggtcgcggatgcgcaagcagcgccacctcgacgagctcaccgcgcaggccgcgcacctgcgccgcgagaacgcgcacgtcgccaccgcgctcggactcaccacgcagggactcctcgccgtcgacgccgagaacgccgtcctccgcacccaggccgccgagctcgccgcgcgcctcggttccctcaacgacatcctcgcctgcatgaacaccaacgccgctgcggccgtcggcgccgtcgccgtctccgtctccctcacagccgccgccgcttcttcctccgacccctacctcgccttcgacggcgccaccgccttggacgacctcctcagatcctgccccgagaatatgtaccagctctgctag

SEQ ID NO: 476 - protein, 171 aa, Sorghum bicolor
MASSSGSGSSGSLSAATAALAAAAGTEEELRALMEQRRAKRMLSNRESARRSRMRKQRHLDELTAQAAHLRRENAHVATALGLTTQGLLAVDAENAVLRTQAAELAARLGSLNDILACMNTNAAAAVGAVAVSVSLTAAAASSSDPYLAFDGATALDDLLRSCPENMYQLC

SEQ ID NO: 477 - DNA, 531 bp, Sorghum bicolor
atgaccctgtctggtgggaccatttcaagtgggacctattctgggtcgagtcatgggacccccagctttgggtcagagggtggcatggtggacctccaggcccggatggagctcaagcggaagagaaggatggaatcaaaccgggagtctgcaaagcggtcaaggcagcggaagcaacaacacctcgacgacctcaacttacaggtcgacaagctgaggacaacgaaacagcaactcatgacagcactgaacatcaccacccagaactacacggcagcagaagctcaaaactcggtgctgcgcacacagatgatggagctggagagcagactctgcgcgctgcgcgagatcatatgctacatgaatgcaaaccatgttgctaatgctgcaacaacaatgaatgcccatccagcaactatcatgagcggagctgctaactacaatacttttggcacaagcgcaactgcatggaactctgccatgcaaatggtccagcagcccatagatcacttgctgtaccagtgcttctag

SEQ ID NO: 478 - protein, 176 aa, Sorghum bicolor
MTLSGGTISSGTYSGSSHGTPSFGSEGGMVDLQARMELKRKRRMESNRESAKRSRQRKQQHLDDLNLQVDKLRTTKQQLMTALNITTQNYTAAEAQNSVLRTQMMELESRLCALREIICYMNANHVANAATTMNAHPATIMSGAANYNTFGTSATAWNSAMQMVQQPIDHLLYQCF

SEQ ID NO: 479 - DNA, 492 bp, Solanum lycopersicum
atggcttcgtcaagtggtacatcatcaggttcatcgtttatacaaaactcgggttcagaagaagatcttcagcaattaatggatcagaggaagagaaaaagaatgatatcgaatcgtgaatcggcaagaagatcaaggatgagaaaacagaaacatttggatgatttgatgagtcaagtaacaaatttaagaaaagaaaataatcagattttgacaagtatgaatgttaccacacaacattatcttaacgttgaagctgaaaattcaatattgagggctcagttaagtgaacttagccgtaggcttgagtcacttaatgaaatcattgcagttttggatgcaaacagtggacttgtcatggaccacaatgagccttatagcttcaattttgcacaaaatgacattatgtttgatgggttcaacgtgaccaattcttggaattatctatctgccaatcaacccattatgactgccgatgtcttgcagtactga

SEQ ID NO: 480 - protein, 163 aa, Solanum lycopersicum
MASSSGTSSGSSFIQNSGSEEDLQQLMDQRKRKRMISNRESARRSRMRKQKHLDDLMSQVTNLRKENNQILTSMNVTTQHYLNVEAENSILRAQLSELSRRLESLNEIIAVLDANSGLVMDHNEPYSFNFAQNDIMFDGFNVTNSWNYLSANQPIMTADVLQY

SEQ ID NO: 481 - DNA, 474 bp, Tagetes erecta
atggcttcatcaggtggttcatacgtgcttcaaaactcgggttcagatgaagatcttcaacaactaatggatcaaagaaagaggaaaagaatggtatcgaatcgggaatcggcaaggagatcaagaatgaagaagcaaaagcacttggatgatctcatgactcagttgagtcaactcaaaaaggagaacaatgagattatggctcacgttagtatcaccatgcagcattatacgaatatggaggctgagaatttggtgttgagggctcaggtggccgagttgagccatcggttggagtcgcttgaccagatcaaggagttcatgagccagcctgtcgactacggtggtggatttgtggatgagttgtattgcggtggtggtactgagttgatggacgagtttatgaataactcactgagttgtctttgtgttaacaagccgattttagcttcttcagacatgattcagtattaa

SEQ ID NO: 482 - protein, 157 aa, Tagetes erecta
MASSGGSYVLQNSGSDEDLQQLMDQRKRKRMVSNRESARRSRMKKQKHLDDLMTQLSQLKKENNEIMAHVSITMQHYTNMEAENLVLRAQVAELSHRLESLDQIKEFMSQPVDYGGGFVDELYCGGGTELMDEFMNNSLSCLCVNKPILASSDMIQY

SEQ ID NO: 483 - DNA, 435 bp, Tamarix hispida
atgtatcaacccgtgagttctggttccgacggcgatgttcgctacgcaaacttggacgagagaaaacgcaaaaggatgatctccaaccgggaatcagcccgtcgttctcgtatgaggaaacaacagcacctaggtgatttgctcaaccaagtatcaaagctccaggccgagaactctcaattcgttgcgaagatcaattcggcttcgcaaatgtatgtcaaagttgaatcagaaaataatgtgttaagagctcaattgatggagttgacggacagattgaattctctgaattccttgcttcgtgttatggaaaatgttagcggtttgaatgctgacgtagaggaattaccggatgctttgcttgagccttggcaatcgccttgtcctgttcagttgccggttatgactaataccgctgatatgtttcagttctaa

SEQ ID NO: 484 - protein, 144 aa, Tamarix hispida
MYQPVSSGSDGDVRYANLDERKRKRMISNRESARRSRMRKQQHLGDLLNQVSKLQAENSQFVAKINSASQMYVKVESENNVLRAQLMELTDRLNSLNSLLRVMENVSGLNADVEELPDALLEPWQSPCPVQLPVMTNTADMFQF

SEQ ID NO: 485 - DNA, 468 bp, Medicago truncatula
atggcttcttcaagtggaacatcttcaggctattcaacacttccaaattcaggttcagaggaagatttgatgcttctgatggatcaaagaaaaagaaagagaatgatatcgaaccgcgaatcagcaagaagatctcgaatgaggaaacaaaagcacttagatgatcttgctgttcagttgagtcaactaaggaatgagaatcaacagattctaacttctgtgaacctaacaactcaacgattcttagctgttgaatctgaaaactcagtgcttagagctcaactgaatgaactcaacagcagatttgagtctttgaatgagatcatcaacttcatgaatgttgcaaatggtgtttttgaacctgttgataataatattaatgaaaattacttcaacaaccctttgaatatgggttatttgaaccaaccaatcatggcttctgcagatatgaacatgatacattattga

SEQ ID NO: 486 - protein, 155 aa, Medicago truncatula
MASSSGTSSGYSTLPNSGSEEDLMLLMDQRKRKRMISNRESARRSRMRKQKHLDDLAVQLSQLRNENQQILTSVNLTTQRFLAVESENSVLRAQLNELNSRFESLNEIINFMNVANGVFEPVDNNINENYFNNPLNMGYLNQPIMASADMNMIHY

SEQ ID NO: 487 - DNA, 432 bp, Vitis vinifera
atgatggcttcttcaagtggaaactcttcaggatcaactcagcttcagaactctgcatgtgatggatcaaagaaaaaggaagagaatgctatcaaatcgggaatccgcaaggcaaaacagaagcacctggatgatctgatggcccaagttgctcagctcaggaaggaaaataacgaaatcctttcaagcatcaacatcaccaaccagcgctacttgaccgttgaggctgataattcaattttgagggctcaggctatggaactgagccacagatatcagtctctcaatgacatcctcaattacatgaacacaagcaatggcgtctttgaaactgaggatcttcccgtcactgttgatcccttcatgaacccaatgaactacctttaccttaaccaacccatcattgcttctgtagacatgtttccatactga

SEQ ID NO: 488 - protein, 143 aa, Vitis vinifera
MMASSSGNSSGSTQLQNSACDGSKKKEENAIKSGIRKAKQKHLDDLMAQVAQLRKENNEILSSINITNQRYLTVEADNSILRAQAMELSHRYQSLNDILNYMNTSNGVFETEDLPVTVDPFMNPMNYLYLNQPIIASVDMFPY

SEQ ID NO: 489 - DNA, 474 bp, Vitis vinifera
atggcttcctccagtggcacatcttcagggtcaactttgcttcagaactctggttctgaagaagatttgcaggctttgatggatcagagaaagcggaaaagaatgatatccaatagagaatctgcaagaaggtcaaggatgaggaagcagaagcacttggatgatctaatggctcaggctgctcagctgaggaaggagaacagccagattatcacaagcatgaatgtcaccacccagcattactttaacattgaggctgaaaattcagtactcagagctcaattctctgagctcagcaacagactgcagtatctggttgagatcataagtttcttgaatacaagcaatggtggctttgaaagtggggagccctggacccttcctgagcctaccactcctgacagcctcatgaaccctttgagtttgctatatttgagtcaacccatcatggcttctgatatctttcagtactga

SEQ ID NO: 490 - protein, 157 aa, Vitis vinifera
MASSSGTSSGSTLLQNSGSEEDLQALMDQRKRKRMISNRESARRSRMRKQKHLDDLMAQAAQLRKENSQIITSMNVTTQHYFNIEAENSVLRAQFSELSNRLQYLVEIISFLNTSNGGFESGEPWTLPEPTTPDSLMNPLSLLYLSQPIMASDIFQY

SEQ ID NO: 491 - DNA, 474 bp, Vitis vinifera
atgggttcttctagtggagcttcttcagagtccagccaacttcaacactcaggttccgaagaggatctccggcaaattatggatcaaaggaagcggaaaagaatgctttcgaatcgcgaatcagcgaggcgatcgcggatgcgtaaacaaaagcatctggatgacatgatggcccaaatggttcatctcaggaaggagaacaaccgcatcctcacaaccatgaacgtcaccacacagttccatatgaacgttgaggctgagaatgctattctgagagctcagatggctgagcttaccctccgattacagactctcaatgaaatcatggactacctcaactcaagcaacgtcccctttggaactgaatatcagggtacccagatagctgatgaatgctttatgaatattccatgggttccccccttcatcaatcaacccatcatggcttctgcagacggcatgttcatgtactga

SEQ ID NO: 492 - protein, 157 aa, Vitis vinifera
MGSSSGASSESSQLQHSGSEEDLRQIMDQRKRKRMLSNRESARRSRMRKQKHLDDMMAQMVHLRKENNRILTTMNVTTQFHMNVEAENAILRAQMAELTLRLQTLNEIMDYLNSSNVPFGTEYQGTQIADECFMNIPWVPPFINQPIMASADGMFMY

SEQ ID NO: 493 - DNA, 516 bp, Zea mays
atggcttcctccagcgggagcgggagctcgggctccctctcggcggcaacggcggccctggccgccgcggcgggcacggaggaggagctgcgcgcgctcatggagcagcgccgcgcgaagcggatgctgtccaaccgcgagtccgcgcggcggtcgcggatgtgcaagcagcgccacctcgacgagctgaccgcgcaggcggcgcacctgcgccgcgagaacgcgcacgtggccaccgcgctcggcctcaccgcgcagggcctcctcgccgtggacgccgagaacgccgtcctccgcacccaggccgccgagctcgccgcgcgcctcggctccctcaacgacatcctcgcctgcatgaacaccaacgccgtcggcgccgtcgccgtctccctcacagccgccgccgccgccgccgccgcttcctccgacccctgcctcgccttcgacggcgccaccgccctggacgacctcctcagatcctgccccgagaacatgttccagtaccagctctgctag

SEQ ID NO: 494 - protein, 171 aa, Zea mays
MASSSGSGSSGSLSAATAALAAAAGTEEELRALMEQRRAKRMLSNRESARRSRMCKQRHLDELTAQAAHLRRENAHVATALGLTAQGLLAVDAENAVLRTQAAELAARLGSLNDILACMNTNAVGAVAVSLTAAAAAAAASSDPCLAFDGATALDDLLRSCPENMFQYQLC

SEQ ID NO: 495 - DNA, 480 bp, Zea mays
atggcttcctccagcgggagcgggagctcgggcttcctctcggcggcactggacgcggcggcgacggcgggaacggaggaggagctgcgcgcgctcatggcgcagcgccgcgccaagcggatgctgtcgaaccgcgagtcggcgcggcggtcgcggatgcgcaagcagcgccacctggacgagctcacggcgcaggccgcgcacctgcgccgcgagaacgcgcacgtggccaccgcgctcgggctcacggcgcagggcctcctggccgtcgacgccgacaacgccgtcctccgcacccaggccgccgagctcgccgcgcgcctcggctccctcaacgacatcctcgcctgcatgaacaccaccaacgccgccgccgcctcctccgacccttacctcgccttcgacggcgcggccaccgccttggacgacctcctcaaatcctgccccgacagcatgatgttcgagtaccagctctgctag

SEQ ID NO: 496 - protein, 159 aa, Zea mays
MASSSGSGSSGFLSAALDAAATAGTEEELRALMAQRRAKRMLSNRESARRSRMRKQRHLDELTAQAAHLRRENAHVATALGLTAQGLLAVDADNAVLRTQAAELAARLGSLNDILACMNTTNAAAASSDPYLAFDGAATALDDLLKSCPDSMMFEYQLC

SEQ ID NO: 497 - DNA, 513 bp, Zea mays
atggcttcctccagcgggagcgggagctcgggctccctctcggcggcaacggcggccctggccgccgcggcgggcacggaggaggagctgcgcgcgctcatggagcagcgccgcgcgaagcggatgctgtccaaccgcgagtccgcgcggcggtcgcggatgcgcaagcagcgccacctcgacgagctgaccgcgcaggcggcgcacctgcgccgcgagaacgcgcacgtggccaccgcgctcggcctcaccgcgcagggcctcctcgccgtggacgccgagaacgccgtcctccgcacccagaccgccgagctcgccgcgcgcctcggctccctcaacgacatcctcgcctgcatgaacaccaacgccgtcggcgccgtcgccgtctccctcacagccgccgccgccgccgccgcttcctccgacccctgcctcgccttcgacggcgccaccgccctggacgacctcctcagatcctgccccgagaacatgttccagtaccagctctgctag

SEQ ID NO: 498 - protein, 170 aa, Zea mays
MASSSGSGSSGSLSAATAALAAAAGTEEELRALMEQRRAKRMLSNRESARRSRMRKQRHLDELTAQAAHLRRENAHVATALGLTAQGLLAVDAENAVLRTQTAELAARLGSLNDILACMNTNAVGAVAVSLTAAAAAAASSDPCLAFDGATALDDLLRSCPENMFQYQLC

SEQ ID NO: 499 - DNA, 489 bp, Zea mays
atggcttcctccagcgggagcgggagcgggagctcgggcttcctctcggcggcgctggacttggcggcggcgggaacggaggaggagctgcgcgcgctcatggcgcagcgccgcgccaagcggatgctgtcgaaccgcgagtcggcgcggcggtcgcggatgcgcaagcagcgccacctggacgagctcacggcgcaggccgcgcacctgcgccgcgagaacgcgcacgtggccaccgcgctcgggctcaccgcgcagggcctcctggccgtcgacgccgacaacgccgtcctccgcacccaggccgccgagctcgccgcgcgcctcggctccctcaacgacatcctcgcctgcatgaacaccaccaacgccgccgccgccgccgctttctccgacccctacctcgccttcgacggcgccgccaccgccttggacgacctcctcagatcctgccccgacagcatgatgttcgagtaccagctctgctag

SEQ ID NO: 500 - protein, 162 aa, Zea mays
MASSSGSGSGSSGFLSAALDLAAAGTEEELRALMAQRRAKRMLSNRESARRSRMRKQRHLDELTAQAAHLRRENAHVATALGLTAQGLLAVDADNAVLRTQAAELAARLGSLNDILACMNTTNAAAAAAFSDPYLAFDGAATALDDLLRSCPDSMMFEYQLC

SEQ ID NO: 501 - protein, 31 aa, Populus trichocarpa
KQKHLDDLVAQVAQLKKENHQIITSINITTQ

SEQ ID NO: 502 - protein, 31 aa, Nicotiana tabacum
KQKHLDDLMAQVATLRKENNQILTSMNVTTQ

SEQ ID NO: 503 - protein, 31 aa, Populus trichocarpa
KQKHLDDLMAQVSQLRKENHQIITGINITTQ

SEQ ID NO: 504 - protein, 31 aa, Glycine max
KQKHLDDLVSQVAQLRKENQQILTSVNITTQ

SEQ ID NO: 505 - protein, 31 aa, Glycine max; identical to SEQ ID NO: 504

SEQ ID NO: 506 - protein, 31 aa, Populus trichocarpa
KQKHLDDLMAQVTQLRKDNNQILTTINVTTQ

SEQ ID NO: 507 - protein, 31 aa, Capsicum chinense
KQKHLDDLMAQVSTLRKENDQILTSMNVTTQ

SEQ ID NO: 508 - protein, 31 aa, Capsicum chinense; identical to SEQ ID NO: 507

SEQ ID NO: 509 - protein, 31 aa, Vitis vinifera
KQKHLDDLMAQAAQLRKENSQIITSMNVTTQ

SEQ ID NO: 510 - protein, 31 aa, Medicago truncatula
KQKHLDDLVSQVSKLRKENQEILTSVNITTQ

SEQ ID NO: 511 - protein, 31 aa, Medicago truncatula; identical to SEQ ID NO: 510

SEQ ID NO: 512 - protein, 31 aa, Arabidopsis thaliana
KQKHLDDLTAQVTHLRKENAQIVAGIAVTTQ

SEQ ID NO: 513 - protein, 31 aa, Arabidopsis thaliana; identical to SEQ ID NO: 512

SEQ ID NO: 514 - protein, 31 aa, Solanum lycopersicum
KQKHLDDLMSQVTNLRKENNQILTSMNVTTQ

SEQ ID NO: 515 - protein, 31 aa, Capsicum annuum
KQKHLNDLMAQVSTLRKENDQILTSMNVTTQ

SEQ ID NO: 516 - protein, 31 aa, Arabidopsis thaliana
KQKLLDDLTAQVNHLKKENTEIVTSVSITTQ

SEQ ID NO: 517 - protein, 31 aa, Arabidopsis thaliana; identical to SEQ ID NO: 516

SEQ ID NO: 518 - protein, 31 aa, Glycine max
KQKHLDDLASQVTQLRNENHQILTSVNLTTQ

SEQ ID NO: 519 - protein, 31 aa, Vitis vinifera
KQKHLDDLMAQVAQLRKENNEILSSINITNQ

SEQ ID NO: 520 - protein, 31 aa, Brassica napus
KQKLLDDLTAQVNQLRKENSEIVTSVSITTQ

SEQ ID NO: 521 - protein, 31 aa, Oryza sativa
KQRHLDDLTAQVAHLRRENAHVATALGLTTQ

SEQ ID NO: 522 - protein, 31 aa, Medicago truncatula
KQKHLDDLAVQLSQLRNENQQILTSVNLTTQ

SEQ ID NO: 523 - protein, 31 aa, Vitis vinifera
KQKHLDDMMAQMVHLRKENNRILTTMNVTTQ

SEQ ID NO: 524 - protein, 31 aa, Populus trichocarpa
KQKYLGDLMAQVAQLRTDNNQILTTINVTTQ

SEQ ID NO: 525 - protein, 31 aa, Petroselinum crispum
KQNHLDELMAQAAQLRKENNQIITTTNLTTQ

SEQ ID NO: 526 - protein, 31 aa, Sorghum bicolor
KQRHLDELTAQAAHLRRENAHVATALGLTTQ

SEQ ID NO: 527 - protein, 31 aa, Brassica napus
KQKLLDDLTAQVNRLKEQNNEILTSVSITTQ

SEQ ID NO: 528 - protein, 31 aa, Brassica napus
KQKHLDDLTAQIAHFLEENSHIVAGISVTTQ

SEQ ID NO: 529 - protein, 31 aa, Zea mays
KQRHLDELTAQAAHLRRENAHVATALGLTAQ

SEQ ID NO: 530 - protein, 31 aa, Zea mays; identical to SEQ ID NO: 529

SEQ ID NO: 531 - protein, 31 aa, Zea mays; identical to SEQ ID NO: 529

SEQ ID NO: 532 - protein, 31 aa, Zea mays; identical to SEQ ID NO: 529

SEQ ID NO: 533 - protein, 31 aa, Tagetes erecta
KQKHLDDLMTQLSQLKKENNEIMAHVSITMQ

SEQ ID NO: 534 - protein, 31 aa, Populus trichocarpa
KQKHLDDLMGQLGQLSKENNEILKRMNVTSQ

SEQ ID NO: 535 - protein, 31 aa, Arabidopsis thaliana
KQKHVDDLTAQINQLSNDNRQILNSLTVTSQ

SEQ ID NO: 536 - protein, 31 aa, Hordeum vulgare
KQRHLDDLAAQAAHLRRENAHVAAALGLTAR

SEQ ID NO: 537 - protein, 31 aa, Glycine max
KQKHLDDLASQLTQLRSQNQQLLTSVNLTSH

SEQ ID NO: 538 - protein, 31 aa, Arabidopsis thaliana
KQEHVDDLTAQINQLSNDNRQILNSLTVTSQ

SEQ ID NO: 539 - protein, 31 aa, Sorghum bicolor
KQQHLDDLNLQVDKLRTTKQQLMTALNITTQ

SEQ ID NO: 540 - protein, 31 aa, Glycine max
KRNHLDQLTKQLSQLAKNNGEILATIDITTQ

SEQ ID NO: 541 - protein, 31 aa, Glycine max
KQQHLEGLSAQLDQLKKENTQMNTNIGISTQ

SEQ ID NO: 542 - protein, 31 aa, Tamarix hispida
KQQHLGDLLNQVSKLQAENSQFVAKINSASQ

SEQ ID NO: 543 - protein, 26 aa, Brassica napus
VEAENSVLRAQLDELSHRLESLNDII

SEQ ID NO: 544 - protein, 26 aa, Nicotiana tabacum
VEAENSILRAQLAELNHRLESLNEII

SEQ ID NO: 545 - protein, 26 aa, Capsicum annuum
VEAENSILRAQLSELSHRLESLNEII

SEQ ID NO: 546 - protein, 26 aa, Capsicum chinense
VEAENSILRAQLSELSHRLESLNEII

SEQ ID NO: 547 - protein, 26 aa, Capsicum chinense
VEAENSILRAQLSELSHRLESLNEII

SEQ ID NO: 548 - protein, 26 aa, Glycine max
VEAENSVLRAQVGELSHRLESLNEIV

SEQ ID NO: 549 - protein, 26 aa, Glycine max
VEAENSVLRAQVGELSHRLESLNEIV

SEQ ID NO: 550 - protein, 26 aa, Arabidopsis thaliana
VEAENSVLRAQLDELNHRLQSLNDII

SEQ ID NO: 551 - protein, 26 aa, Arabidopsis thaliana
VEAENSVLRAQLDELNHRLQSLNDII

SEQ ID NO: 552 - protein, 26 aa, Glycine max
VEAENSVLRAQVNELSHWLESLNEII

SEQ ID NO: 553 - protein, 26 aa, Populus trichocarpa
IEAENSILRAQMAELSHRLNSLNEII

SEQ ID NO: 554 - protein, 26 aa, Populus trichocarpa
VEAENSILRAQMMELNHRLDSLNEIL

SEQ ID NO: 555 - protein, 26 aa, Populus trichocarpa
VEAENSILRAQMMELNHRLDSLNEIL

SEQ ID NO: 556 - protein, 26 aa, Glycine max
VEAENSVLRAQVNELSHRLDSLNQII

SEQ ID NO: 557 - protein, 26 aa, Medicago truncatula
VEAENSVLRAQMGELSNRLESLNEIV

SEQ ID NO: 558 - protein, 26 aa, Glycine max
VEAENSILRAQMGELSQRLQSLNDIV

SEQ ID NO: 559 - protein, 26 aa, Solanum lycopersicum
VEAENSILRAQLSELSRRLESLNEII

SEQ ID NO: 560 - protein, 26 aa, Brassica napus
VEAENSVLKAQLDELSHRLESLNGII

SEQ ID NO: 561 - protein, 26 aa, Arabidopsis thaliana
IEAENDILRAQVLELNHRLQSLNEIV

SEQ ID NO: 562 - protein, 26 aa, Arabidopsis thaliana
IEAENDILRAQVLELNHRLQSLNEIV

SEQ ID NO: 563 - protein, 26 aa, Populus trichocarpa
VEADNSILRAQVSELSHRLEFLNGII

SEQ ID NO: 564 - protein, 26 aa, Petroselinum crispum
VEAENSVLRAQMDELTQRLQSLNDIL

SEQ ID NO: 565 - protein, 26 aa, Hordeum vulgare
VDAENAVLRTQAAELAARLQSLNDII

SEQ ID NO: 566 - protein, 26 aa, Vitis vinifera
VEADNSILRAQAMELSHRYQSLNDIL

SEQ ID NO: 567 - protein, 26 aa, Populus trichocarpa
VEADNSILRVQISELSNRLESLNEII

SEQ ID NO: 568 - protein, 26 aa, Glycine max
VEAENAILRAQMEELSKRLNSLNEMI

SEQ ID NO: 569 - protein, 26 aa, Sorghum bicolor
VDAENAVLRTQAAELAARLGSLNDIL

SEQ ID NO: 570 - protein, 26 aa, Zea mays
VDAENAVLRTQAAELAARLGSLNDIL

SEQ ID NO: 571 - protein, 26 aa, Medicago truncatula
VESENSVLRAQLNELNSRFESLNEII

SEQ ID NO: 572 - protein, 26 aa, Zea mays
VDAENAVLRTQTAELAARLGSLNDIL

SEQ ID NO: 573 - protein, 26 aa, Vitis vinifera
VEAENAILRAQMAELTLRLQTLNEIM

SEQ ID NO: 574 - protein, 26 aa, Vitis vinifera
IEAENSVLRAQFSELSNRLQYLVEII

SEQ ID NO: 575 - protein, 26 aa, Zea mays
VDADNAVLRTQAAELAARLGSLNDIL

SEQ ID NO: 576 - protein, 26 aa, Zea mays
VDADNAVLRTQAAELAARLGSLNDIL

SEQ ID NO: 577 - protein, 26 aa, Oryza sativa
VDAENAVLRTQAAELAARLASLNDIL

SEQ ID NO: 578 - protein, 26 aa, Brassica napus
IEGENSVLRAQFLELNQRLNSLNEIV

SEQ ID NO: 579 - protein, 26 aa, Arabidopsis thaliana
IQAENSVLTAQMEELSTRLQSLNEIV

SEQ ID NO: 580 - protein, 26 aa, Arabidopsis thaliana
IQAENSVLTAQMEELSTRLQSLNEIV

SEQ ID NO: 581 - protein, 26 aa, Tagetes erecta
MEAENLVLRAQVAELSHRLESLDQIK

SEQ ID NO: 582 - protein, 26 aa, Sorghum bicolor
AEAQNSVLRTQMMELESRLCALREII

SEQ ID NO: 583 - protein, 26 aa, Tamarix hispida
VESENNVLRAQLMELTDRLNSLNSLL

SEQ ID NO: 584 - protein, 26 aa, Medicago truncatula
SGTSSGSSLLQNSGSEEDLQALMDQR

SEQ ID NO: 585 - protein, 15 aa, Tamarix hispida
KRMISNRESARRSRM

SEQ ID NO: 586 - protein, 15 aa, Glycine max
KRMISNRESARRSRM

SEQ ID NO: 587 - protein, 15 aa, Medicago truncatula
KRMISNRESARRSRM

SEQ ID NO: 588 - protein, 15 aa, Vitis vinifera
KRMISNRESARRSRM

SEQ ID NO: 589 - protein, 15 aa, Glycine max
KRMISNRESARRSRM

SEQ ID NO: 590 - protein, 15 aa, Medicago truncatula
KRMISNRESARRSRM

SEQ ID NO: 591 - protein, 15 aa, Populus trichocarpa
KRMISNRESARRSRM

SEQ ID NO: 592 - protein, 15 aa, Populus trichocarpa
KRMISNRESARRSRM

SEQ ID NO: 593 - protein, 15 aa, Nicotiana tabacum
KRMISNRESARRSRM

SEQ ID NO: 594 - protein, 15 aa, Capsicum annuum
KRMISNRESARRSRM

SEQ ID NO: 595 - protein, 15 aa, Capsicum chinense
KRMISNRESARRSRM

SEQ ID NO: 596 - protein, 15 aa, Capsicum chinense
KRMISNRESARRSRM

SEQ ID NO: 597 - protein, 15 aa, Solanum lycopersicum
KRMISNRESARRSRM

SEQ ID NO: 598 - protein, 15 aa, Glycine max
KRMISNRESARRSRM

SEQ ID NO: 599 - protein, 15 aa, Glycine max
KRMISNRESARRSRM

SEQ ID NO: 600 - protein, 15 aa, Medicago truncatula
KRMISNRESARRSRM

SEQ ID NO: 601 - protein, 15 aa, Vitis vinifera
KRMLSNRESARRSRM

SEQ ID NO: 602 - protein, 15 aa, Arabidopsis thaliana
KRMLSNRESARRSRM

SEQ ID NO: 603 - protein, 15 aa, Arabidopsis thaliana
KRMLSNRESARRSRM

SEQ ID NO: 604 - protein, 15 aa, Brassica napus
KRMLSNRESARRSRM

SEQ ID NO: 605 - protein, 15 aa, Arabidopsis thaliana
KRMLSNRESARRSRM

SEQ ID NO: 606 - protein, 15 aa, Hordeum vulgare
KRMLSNRESARRSRM

SEQ ID NO: 607 - protein, 15 aa, Sorghum bicolor
KRMLSNRESARRSRM

SEQ ID NO: 608 - protein, 15 aa, Zea mays
KRMLSNRESARRSRM

SEQ ID NO: 609 - protein, 15 aa, Zea mays
KRMLSNRESARRSRM

SEQ ID NO: 610 - protein, 15 aa, Zea mays
KRMLSNRESARRSRM

SEQ ID NO: 611 - protein, 15 aa, Zea mays
KRMLSNRESARRSRM

SEQ ID NO: 612 - protein, 15 aa, Oryza sativa
KRMLSNRESARRSRM

SEQ ID NO: 613 - protein, 15 aa, Populus trichocarpa
KRMLSNRESARRSRM

SEQ ID NO: 614 - protein, 15 aa, Glycine max
KRMLSNRESARRSRM

SEQ ID NO: 615 - protein, 15 aa, Populus trichocarpa
KRMQSNRESARRSRM

SEQ ID NO: 616 - protein, 15 aa, Tagetes erecta
KRMVSNRESARRSRM

SEQ ID NO: 617 - protein, 15 aa, Glycine max
KRKQSNRESARRSRM

SEQ ID NO: 618 - protein, 15 aa, Arabidopsis thaliana
KRKQSNRESARRSRM

SEQ ID NO: 619 - protein, 15 aa, Arabidopsis thaliana
KRKQSNRESARRSRM

SEQ ID NO: 620 - protein, 15 aa, Brassica napus
KRKESNRESARRSRM

SEQ ID NO: 621 - protein, 15 aa, Arabidopsis thaliana
KRMLSNRESARRSRV

SEQ ID NO: 622 - protein, 15 aa, Populus trichocarpa
KRMLSNRESARRSRV

SEQ ID NO: 623 - protein, 15 aa, Brassica napus
KRMLSNRESARRSRK

SEQ ID NO: 624 - protein, 15 aa, Petroselinum crispum
KRMQSNRESARRSRQ

SEQ ID NO: 625 - protein, 15 aa, Sorghum bicolor
RRMESNRESAKRSRQ

SEQ ID NO: 626 - protein, 15 aa, Vitis vinifera
KKKEENAIKSGIRKA

SEQ ID NO: 627 - DNA, 56 bp, Artificial sequence
  sense primer
ggggacaagtttgtacaaaaaagcaggcttaaacaatggcttcatcaagtggaaca

SEQ ID NO: 628 - DNA, 50 bp, Artificial sequence
  reverse primer
ggggaccactttgtacaagaaagctgggtgaatccggatccgtctcagta

SEQ ID NO: 629 - DNA, 2194 bp, Oryza sativa; identical to SEQ ID NO: 264

SEQ ID NO: 630 - DNA, 6 bp, Artificial sequence
  A-box
tacgta

SEQ ID NO: 631 - DNA, 6 bp, Artificial sequence
  C-box
gacgtc

SEQ ID NO: 632 - DNA, 6 bp, Artificial sequence
  G box
cacgtg

SEQ ID NO: 633 - DNA, 1374 bp, Oryza sativa
atggctactcgcattcctggtactgtagcagctagcggggtgtactacaatgatcaatacagaatgccatgtaagctgaaaggaattcattgcatggcattgaattgtataccgcaaaaagcgaaggtaaggaagtgcatgaatggatatcaatcaacattcaggttttgtgtaaatgagaaaaatggacaaaccaccgggcagtcaaatggttccttgatccaacaaggccagaatttccggtgtcattcttatggttctcataacagcagtgaaactaaagagtgcagccttgaagatggcactgattcatacagggattttgaagaacattcaagaggagcctcccaattttcagataatcaagttgcagcaaagaaaaaatcagtcaaatctagtcaagggttggctgaagcttgcaaatttgtttacaacgatgcaaaatttgtgaatgaaagagctcaaaatgatattctcttgctttcacgtggcataacaaggctgaacaaacgtgcgtgccaggatgttgctgttttagggtcaggatttctcaagcttgatgctcgtgcaaggaaggacactaaaaaaattgaccacagtgtgaaggaaagggcagcgcggcttacccattttgcgagaatattaaaggaacaggctcagtcagacttgaagaaagcagcagatcagcattggagcgatggtgctttggaggcagatctgcgacgagctgactcggttgttagacgacgtgccatggaagatgctttcatggctttaaagtttgttcgggatatccatgacatgatggcaaacagattacaagagcaattcgcaaaggatggttcctcttctcctgctaattcaagaagtttcatcacccttgagaaaaatggaaataccttcgagctgtttcctcatgaagtttcaacggaccagattaccgccatagagcaagcatactggagtatggcatctgcgttgtctgaggctgatggtatcgactacacagatcctgaggagcttgagttgttagtagcaactctcattgacctggacgccatggatgggaaaaagagtgtttccttacttgctgaatgttcaagctctccagatgttaataccaggaaagctttagctaatgcactggctgtagctccatccatgtggattcttggaaatgctgggatgggtgcattacagagattggctcaagattccaattatgctgtagccagggctgcaacaagagccatcaatgaactcacaaagcaatgggagcttgaagaaggtgacagcctgaggtttgtactgaatcaaaatatggtttctaaagagacagccgatgacagtgcagcagcagatgacaccaggtga

SEQ ID NO: 634 - protein, 457 aa, Oryza sativa
MATRIPGTVAASGVYYNDQYRMPCKLKGIHCMALNCIPQKAKVRKCMNGYQSTFRFCVNEKNGQTTGQSNGSLIQQGQNFRCHSYGSHNSSETKECSLEDGTDSYRDFEEHSRGASQFSDNQVAAKKKSVKSSQGLAEACKFVYNDAKFVNERAQNDILLLSRGITRLNKRACQDVAVLGSGFLKLDARARKDTKKIDHSVKERAARLTHFARILKEQAQSDLKKAADQHWSDGALEADLRRADSVVRRRAMEDAFMALKFVRDIHDMMANRLQEQFAKDGSSSPANSRSFITLEKNGNTFELFPHEVSTDQITAIEQAYWSMASALSEADGIDYTDPEELELLVATLIDLDAMDGKKSVSLLAECSSSPDVNTRKALANALAVAPSMWILGNAGMGALQRLAQDSNYAVARAATRAINELTKQWELEEGDSLRFVLNQNMVSKETADDSAAADDTR

SEQ ID NO: 635 - DNA, 1254 bp, Arabidopsis thaliana
atggctcttaacgtgagcaaggttgttcccaatagtccaattttagttaagagtgttaatgcttcaagatctcgaagagttctgttggcgtatgttcatcatcctttagctgctaataagggttcatctattgaagagttaaagcaaggtctttgttgtacaaagactgtcacttttgttagttctcggagatgttctacattgtgctttgttggaaagcctcaagacactgaaactaattcccaagttgtacaaaaagaaggtgagaagcaagtgatgccgaggaggaaaagtagcaactcaagccaacttttggtggaatatgtgtctaatgatgctaagtttgcgaatgaaagagctcgtaatgactttgttcttctatctcgtggtattatgagacttgatgctcgtgcacgacaggatgttgccattcttggttccgggttccttaaactcgatgctcgggcaagagaagatacagagaaaatagaccgtgatgtcaagagaaaagccgagcgccttcatcatattgctactatatttaaaaacatagctgagtctaagttgaaaaatgccgctgataagcattggagcgatggcgctttagaggctgatttaaggcgagcagatttccgtgctaaacaacgggccatggaagacgcattaatggctttagagtttattaagaacatccacgacatgatggtgaacaaaatggttgacagcttggtgacatctgaaactggtaccacggatcgcatatcgcttgagaagaatggaatagctctcgggtttttccctggggaagtttcatctgatcgcatatctgctattgaggaagcttacaagagtatggcatcagcgctctcagaagccgatggaattgactacactgaccctgaagaactcgagttgttagtcacgactctgattgaccttgatgcaatggatggtaaaagtagtgcatctctcttggctgaatgctcaagctctccagatgtcaatacaagaaaagcgttggctaatgctttagcagcggcaccatcaatgtggacactaggaaatgcaggaatgggagcattacagagactcgctgaagacagtaacccggcgattgcagcagctgcttcgagagcgatcaatgcgctgaagaagcaatgggaagtagaggaaggagactcactgaggtttatgatgaacttcgagaggccgaatgatgatgatgatgtagacagtgaccttgatgagatctga

SEQ ID NO: 636 - protein, 417 aa, Arabidopsis thaliana
MALNVSKVVPNSPILVKSVNASRSRRVLLAYVHHPLAANKGSSIEELKQGLCCTKTVTFVSSRRCSTLCFVGKPQDTETNSQVVQKEGEKQVMPRRKSSNSSQLLVEYVSNDAKFANERARNDFVLLSRGIMRLDARARQDVAILGSGFLKLDARAREDTEKIDRDVKRKAERLHHIATIFKNIAESKLKNAADKHWSDGALEADLRRADFRAKQRAMEDALMALEFIKNIHDMMVNKMVDSLVTSETGTTDRISLEKNGIALGFFPGEVSSDRISAIEEAYKSMASALSEADGIDYTDPEELELLVTTLIDLDAMDGKSSASLLAECSSSPDVNTRKALANALAAAPSMWTLGNAGMGALQRLAEDSNPAIAAAASRAINALKKQWEVEEGDSLRFMMNFERPNDDDDVDSDLDEI

SEQ ID NO: 637 - DNA, 1254 bp, Arabidopsis thaliana
atggctcttaacgtgagcaaggttgttcccaatagtccaattttagttaagagtgttaatgcttcaagatctcgaagagttctgttggcgtatgttcatcatcctttagctgctaataagggttcatctgttgaagagttaaagcaaggtctttgttgtacaaagactgtcactcttgttagttctcggagatgttctacattgtgctttgttggaaaatctcaagacactgaaactaattcccaagttgtacaaaaagaaggtgagaagcaagtgatgccgaggaggaagagtagtaactcaagccaacttttggtggaatatgtgtctaatgatgcgaagtttgtgaatgaacgggctcgtaatgactttgttcttctatctcgtggcatcatgaggcttgatgctcgtgcacgacaggatgttgccattcttgggtccgggttccttaaactcgatgctcgagcaagagaagatacagagaaaatagatcgtgatgttaagagaaaggccgagcgccttcatcatattgctactatattaaaaaacatagctgagtctaagttgaaaaatgctgctgataagcattggagcgatggtgccttagaggctgatttaaggcgagcagatttccgtgctaaacaacgagccatggaagacgcattcatggctttagagttcattaagaacatccacgacatgatggtgaacaaaatgcttgacagcttgctgacatctgaaaccggtaccacggatcgcatatcgcttgagaagaatggaatagctctcgggtttttccctggggaagtttcatctgatcgcatatctgctattgaggaagcttacaagagtatggcatcagcgctctcagaagccgatgggattgactacactgaccccgaagagctcgagttattagtcacgactctgattgaccttgatgcaatggatggtaaaagtagtgcatctctcttggctgaatgctcaagctctccagatgtcaatacaagaaaagcgttggctaatgccttagcagcggcaccatcaatgtggacactaggaaatgcaggcatgggagcattacagagactcgctgaagacagtaacccggcgattgcagcagctgcttcgagagcgatcaatgcgctgaagaagcaatgggaagtagaggaaggagactcactgaggtttatgatgaacttcgagactccgaatgatgatgatgatgtagacagtgaccttgatgagatctga

SEQ ID NO: 638 - protein, 417 aa, Arabidopsis thaliana
MALNVSKVVPNSPILVKSVNASRSRRVLLAYVHHPLAANKGSSVEELKQGLCCTKTVTLVSSRRCSTLCFVGKSQDTETNSQVVQKEGEKQVMPRRKSSNSSQLLVEYVSNDAKFVNERARNDFVLLSRGIMRLDARARQDVAILGSGFLKLDARAREDTEKIDRDVKRKAERLHHIATILKNIAESKLKNAADKHWSDGALEADLRRADFRAKQRAMEDAFMALEFIKNIHDMMVNKMLDSLLTSETGTTDRISLEKNGIALGFFPGEVSSDRISAIEEAYKSMASALSEADGIDYTDPEELELLVTTLIDLDAMDGKSSASLLAECSSSPDVNTRKALANALAAAPSMWTLGNAGMGALQRLAEDSNPAIAAAASRAINALKKQWEVEEGDSLRFMMNFETPNDDDDVDSDLDEI

SEQ ID NO: 639 - DNA, 567 bp, Brassica napus
atggttgacagcttggttacatctgaaattggtaccacggaccgcatatcacttgagaagaatggcaaagctctagattttttcccaggggaagtttcatctgatcgcatatctgctattgaggaagcttacaagagtatggcatcagcgctctcagaagccgatggaattattgactacactgaccctgaagagcttgagttgttagtcacaactctgatagaccttgatgcaatggatggtaaaagtagtgcatctctcttggctgaatgctcaatctctccagacgtcaatacaagaaaagcgttggctaacgccttggcagctgcaccgtcgatgtggacacttggaaatgcaggcatgggagcattacagaggcttgcgcaagacagtaacccagcaattgcagcagctgcttcgagagcgatcatagcgctgaagaagcagtgggaagtagaagaaggtgactcacttaggtttatgatgaactttgagaaaccgagtgatgatgatgataaagaagaagaagaagaagaagatggagacagtgaccatgacgaaatctga

SEQ ID NO: 640 - protein, 188 aa, Brassica napus
MVDSLVTSEIGTTDRISLEKNGKALDFFPGEVSSDRISAIEEAYKSMASALSEADGIIDYTDPEELELLVTTLIDLDAMDGKSSASLLAECSISPDVNTRKALANALAAAPSMWTLGNAGMGALQRLAQDSNPAIAAAASRAIIALKKQWEVEEGDSLRFMMNFEKPSDDDDKEEEEEEDGDSDHDEI

SEQ ID NO: 641 - DNA, 1374 bp, Oryza sativa
atggctactcgcattcctggtactgtagcagctagcggggtgtactacaatgatcaatacagaatgccatgtaagctgaaaggaattcattgcatggcattgaattgtataccgcaaaaagcgaaggtaaggaagtgcatgaatggatatcaatcaacattcaggttttgtgtaaatgagaaaaatggacaaaccaccgggcagtcaaatggttccttgatccaacaaggccagaatttccggtgtcattcttatggttctcataacagcagtgaaactaaagagtgcagccttgaagatggcactgattcatacagggattttgaagaacattcaagaggagcctcccaattttcagataatcaagttgcagcaaagaaaaaatcagtcaaatctagtcaagggttggctgaagcttgcaaatttgtttacaacgatgcaaaatttgtgaatgaaagagctcaaaatgatattctcttgctttcacgtggcataacaaggctgaacaaacgtgcgtgccaggatgttgctgttttagggtcaggatttctcaagcttgatgctcgtgcaaggaaggacactaaaaaaattgaccacagtgtgaaggaaagggcagcgcggcttacccattttgcgagaatattaaaggaacaggctcagtcagacttgaagaaagcagcagatcagcattggagcgatggtgctttggaggcagatctgcgacgagctgactcggttgttagacgacgtgccatggaagatgctttcatggctttaaagtttgttcgggatatccatgacatgatggcaaacagattacaagagcaattcgcaaaggatggttcctcttctcctgctaattcaagaagtttcatcacccttgagaaaaatggaaataccttcgagctgtttcctcatgaagtttcaacggaccagattaccgccatagagcaagcatactggagtatggcatctgcgttgtctgaggctgatggtatcgactacacagatcctgaggagcttgagttgttagtagcaactctcattgacctggacgccatggatgggaaaaagagtgtttccttacttgctgaatgttcaagctctccagatgttaataccaggaaagctttagctaatgcactggctgcagctccatccatgtggattcttggaaatgctgggatgggtgcattacagagattggctcaagattccaattatgctgtagccagggctgcaacaagagccatcaatgaactcacaaagcaatgggagcttgaagaaggtgacagcctgaggtttgtactgaatcaaaatatggtttctaaagagacagccgatgacagtgcagcagcagatgacaccaggtga

SEQ ID NO: 642 - protein, 457 aa, Oryza sativa
MATRIPGTVAASGVYYNDQYRMPCKLKGIHCMALNCIPQKAKVRKCMNGYQSTFRFCVNEKNGQTTGQSNGSLIQQGQNFRCHSYGSHNSSETKECSLEDGTDSYRDFEEHSRGASQFSDNQVAAKKKSVKSSQGLAEACKFVYNDAKFVNERAQNDILLLSRGITRLNKRACQDVAVLGSGFLKLDARARKDTKKIDHSVKERAARLTHFARILKEQAQSDLKKAADQHWSDGALEADLRRADSVVRRRAMEDAFMALKFVRDIHDMMANRLQEQFAKDGSSSPANSRSFITLEKNGNTFELFPHEVSTDQITAIEQAYWSMASALSEADGIDYTDPEELELLVATLIDLDAMDGKKSVSLLAECSSSPDVNTRKALANALAAAPSMWILGNAGMGALQRLAQDSNYAVARAATRAINELTKQWELEEGDSLRFVLNQNMVSKETADDSAAADDTR

SEQ ID NO: 643 - DNA, 1296 bp, Oryza sativa
atggctactcgcattcctggtactgtagcagctagcggggtgtactacaatgatcaatacagaatgccatgtaagctgaaaggaattcattgcatggcattgaattgtataccgcaaaaagcgaagtcaaatggttccttgatccaacaaggccagaatttccggtgtcattcttatggttctcataacagcagtgaaactaaagagtgcagccttgaagatggcactgattcatacagggattttgaagaacattcaagaggagcctcccaattttcagataatcaagttgcagcaaagaaaaaatcagtcaaatctagtcaagggttggctgaagcttgcaaatttgtttacaacgatgcaaaatttgtgaatgaaagagctcaaaatgatattctcttgctttcacgtggcataacaaggctgaacaaacgtgcgtgccaggatgttgctgttttagggtcaggatttctcaagcttgatgctcgtgcaaggaaggacactaaaaaaattgaccacagtgtgaaggaaagggcagcgcggcttacccattttgcgagaatattaaaggaacaggctcagtcagacttgaagaaagcagcagatcagcattggagcgatggtgctttggaggcagatctgcgacgagctgactcggttgttagacgacgtgccatggaagatgctttcatggctttaaagtttgttcgggatatccatgacatgatggcaaacagattacaagagcaattcgcaaaggatggttcctcttctcctgctaattcaagaagtttcatcacccttgagaaaaatggaaataccttcgagctgtttcctcatgaagtttcaacggaccagattaccgccatagagcaagcatactggagtatggcatctgcgttgtctgaggctgatggtatcgactacacagatcctgaggagcttgagttgttagtagcaactctcattgacctggacgccatggatgggaaaaagagtgtttccttacttgctgaatgttcaagctctccagatgttaataccaggaaagctttagctaatgcactggctgcagctccatccatgtggattcttggaaatgctgggatgggtgcattacagagattggctcaagattccaattatgctgtagccagggctgcaacaagagccatcaatgaactcacaaagcaatgggagcttgaagaaggtgacagcctgaggtttgtactgaatcaaaatatggtttctaaagagacagccgatgacagtgcagcagcagatgacaccaggtga

SEQ ID NO: 644 - protein, 431 aa, Oryza sativa
MATRIPGTVAASGVYYNDQYRMPCKLKGIHCMALNCIPQKAKSNGSLIQQGQNFRCHSYGSHNSSETKECSLEDGTDSYRDFEEHSRGASQFSDNQVAAKKKSVKSSQGLAEACKFVYNDAKFVNERAQNDILLLSRGITRLNKRACQDVAVLGSGFLKLDARARKDTKKIDHSVKERAARLTHFARILKEQAQSDLKKAADQHWSDGALEADLRRADSVVRRRAMEDAFMALKFVRDIHDMMANRLQEQFAKDGSSSPANSRSFITLEKNGNTFELFPHEVSTDQITAIEQAYWSMASALSEADGIDYTDPEELELLVATLIDLDAMDGKKSVSLLAECSSSPDVNTRKALANALAAAPSMWILGNAGMGALQRLAQDSNYAVARAATRAINELTKQWELEEGDSLRFVLNQNMVSKETADDSAAADDTR

SEQ ID NO: 645 - DNA, 909 bp, Oryza sativa
atgtgtctcatttctaatcctagtggcataacaaggctgaacaaacgtgcgtgccaggatgttgctgttttagggtcaggatttctcaagcttgatgctcgtgcaaggaaggacactaaaaaaattgaccacagtgtgaaggaaagggcagcgcggcttacccattttgcgagaatattaaaggaacaggctcagtcagacttgaagaaagcagcagatcagcattggagcgatggtgctttggaggcagatctgcgacgagctgactcggttgttagacgacgtgccatggaagatgctttcatggctttaaagtttgttcgggatatccatgacatgatggcaaacagattacaagagcaattcgcaaaggatggttcctcttctcctgctaattcaagaagtttcatcacccttgagaaaaatggaaataccttcgagctgtttcctcatgaagtttcaacggaccagattaccgccatagagcaagcatactggagtatggcatctgcgttgtctgaggctgatggtatcgactacacagatcctgaggagcttgagttgttagtagcaactctcattgacctggacgccatggatgggaaaaagagtgtttccttacttgctgaatgttcaagctctccagatgttaataccaggaaagctttagctaatgcactggctgcagctccatccatgtggattcttggaaatgctgggatgggtgcattacagagattggctcaagattccaattatgctgtagccagggctgcaacaagagccatcaatgaactcacaaagcaatgggagcttgaagaaggtgacagcctgaggtttgtactgaatcaaaatatggtttctaaagagacagccgatgacagtgcagcagcagatgacaccaggtga

SEQ ID NO: 646 - protein, 302 aa, Oryza sativa
MCLISNPSGITRLNKRACQDVAVLGSGFLKLDARARKDTKKIDHSVKERAARLTHFARILKEQAQSDLKKAADQHWSDGALEADLRRADSVVRRRAMEDAFMALKFVRDIHDMMANRLQEQFAKDGSSSPANSRSFITLEKNGNTFELFPHEVSTDQITAIEQAYWSMASALSEADGIDYTDPEELELLVATLIDLDAMDGKKSVSLLAECSSSPDVNTRKALANALAAAPSMWILGNAGMGALQRLAQDSNYAVARAATRAINELTKQWELEEGDSLRFVLNQNMVSKETADDSAAADDTR

SEQ ID NO: 647 - DNA, 1362 bp, Sorghum bicolor
atggctagcaacatgtatggcaccacggtggcatgtaggatgtgctacagggatcagtacgggacgccggtgccgcgcgacgtcgcctgtctggccaagaaaccggaggccaggaggtgggggtacgggtaccacctcatctccaggatttgtcagtggaagcccagaggcagcaagtcagctgatggttcactgctcgggcacggtggctgcgatgttcgctgctactcttgtgggtctcataacagctgcgaatgcgaaaccgaagaatgcgatgctgtggaaggtggcgccagcccttacagagatttcaagcagcattcaaggggaaatcctcaattttcacatgatcaagttccaccgaagaagtcagcctatgctagtcaagggttggctgaagcctgcaaatttgtttacaatgatgctaagtttgtaaatgaaagggctcaaaatgacattctattgctttcacgtggtataacaaggctgaacgaacgtgcatgccaggatgctgctgttttgggcttggggtttctcaagcttgatgctcgtgcacgaaaggatacgcaaaagattgaccacactgtgaaggaaagagcagcgcgccttaaccattttgccagagcatttaaggagcgagctcagtcagacttgaagaaagctgcagacaaacattggagtgacggtgctttggaggcagatctgcgacgagctgacttggttgttaaacgacgtgccatggaagacgctttcatggcattgaagtttgttcaggatattcatgacatgatggtgaacagattatatgagcagcttccaaaggacggttcatcttctcgtacaaattcaacagggtttattacacttgagaagaatgggaagactcttgaactgtttcctggtgaagtttctgctgatcagatttatgctatagaggaagcataccagagtatggcatctgccttttctgaagctgatggtattgactacacagatcctgaggagcttgaattgttagtagcaactctaattgacctggatgccatggatgggaaaaggagcgtttccttgattgctgaatgttcaagctctccagatgttaatactaggaaagccctagctaatgcattggctacagctccatcgatgtggactcttgggaatgctggcatgggtgcattgcagagattggctcaagatcccaattatgctgtagctagggctgcatcaagcgccattgatgaactcaagaagcagtgggaacttgaagaaggtgacagtctgaggtttgtaatgaatcagaatttggcttctgaggatactgatggtgacgacaattcagcagcagatgacgacacatga

SEQ ID NO: 648 - protein, 453 aa, Sorghum bicolor
MASNMYGTTVACRMCYRDQYGTPVPRDVACLAKKPEARRWGYGYHLISRICQWKPRGSKSADGSLLGHGGCDVRCYSCGSHNSCECETEECDAVEGGASPYRDFKQHSRGNPQFSHDQVPPKKSAYASQGLAEACKFVYNDAKFVNERAQNDILLLSRGITRLNERACQDAAVLGLGFLKLDARARKDTQKIDHTVKERAARLNHFARAFKERAQSDLKKAADKHWSDGALEADLRRADLVVKRRAMEDAFMALKFVQDIHDMMVNRLYEQLPKDGSSSRTNSTGFITLEKNGKTLELFPGEVSADQIYAIEEAYQSMASAFSEADGIDYTDPEELELLVATLIDLDAMDGKRSVSLIAECSSSPDVNTRKALANALATAPSMWTLGNAGMGALQRLAQDPNYAVARAASSAIDELKKQWELEEGDSLRFVMNQNLASEDTDGDDNSAADDDT

SEQ ID NO: 649 - DNA, 1365 bp, Zea mays
atggctagcaacatgtacggcaccacggtggcctgtaggatgtgctacagagaccagtacaggccgccgccgcgcgacttcacctgcgaggccaggaaatcggaggccaggaggtggggaaacgggtaccaccacatccccaggctctgccagtggaagcccagaggcagcaagtctgatggctcactgctcggcgacggccacggtggccgcgatgctcgctgccactcttgtggttcccataacagctgcgagtgcgaaactagagactgcgatgctatggaagatgctgctgcgagctcttaccgagatttcaagcaacattcaaggggaaatcctcaattttcagataatcaagtttcattgaagaataagtcagcctatgctagtcaagggttggctgaagcctgcaaatttgtttacaatgatgctaagtttgtaaatgaaagggctcaaaatgacattctattactttcacgtggcataacaaggctgaacaaacgtgcatgccaggatgctgctgttttgggcctggggtttctcaaacttgatgctcgtgcacggaaggatactcaaaagattgaccacacagtgaaggagagagcagcgcttcttaaccattttgccagagcatttaaggagcgagctcagtcagacttgaagaaagctgcagacaaacattggagtgatggtgccttggaggcagacctgcgacgagctgacttggttgttaaacgacgtgccatggaagacgctttcatggcattgaagtttgttcaggatatccatgacatgatggtgaacagattatatgagcagcttccgaaggacggttcatcttctcgtacaaattcaacagggtttattacgcttgagaagaacgggaaggctcttgaactgtttcctggtgaagtttctgctgatcagatttatgccatagaggaagcataccagagtatggcatctgccttttctgaagctgatggtattgactacacagatcctgaggagcttgaattgttggtagcaactctaattgacctggatgccatggatgggaaaaggagtgtttccttgattgctgaatgttcaagctctccagatgttaatactaggaaagccctagctaatgcattggctacagctccatctatgtggactcttgggaatgctggcatgggtgcattgcagaggctggctcaagatcccaactacgccgtagctagggccgcatcaagagccattgatgaactcaagaagcagtgggaacttgaagaaggtgacagtctgaggtttgtgatgaaccagaatctggcctccggggatactgatgatgacaattcagccgcggatgatgccgcatga

SEQ ID NO: 650 - protein, 454 aa, Zea mays
MASNMYGTTVACRMCYRDQYRPPPRDFTCEARKSEARRWGNGYHHIPRLCQWKPRGSKSDGSLLGDGHGGRDARCHSCGSHNSCECETRDCDAMEDAAASSYRDFKQHSRGNPQFSDNQVSLKNKSAYASQGLAEACKFVYNDAKFVNERAQNDILLLSRGITRLNKRACQDAAVLGLGFLKLDARARKDTQKIDHTVKERAALLNHFARAFKERAQSDLKKAADKHWSDGALEADLRRADLVVKRRAMEDAFMALKFVQDIHDMMVNRLYEQLPKDGSSSRTNSTGFITLEKNGKALELFPGEVSADQIYAIEEAYQSMASAFSEADGIDYTDPEELELLVATLIDLDAMDGKRSVSLIAECSSSPDVNTRKALANALATAPSMWTLGNAGMGALQRLAQDPNYAVARAASRAIDELKKQWELEEGDSLRFVMNQNLASGDTDDDNSAADDAA

SEQ ID NO: 651 - DNA, 1317 bp, Centaurea solstitialis
atggctaaagtacatgggatcatttactcatcggtaaaaaatccacatcatcccagactaaatggtaatgctcaaggattggtaataagggaattcagtcatggacagctttctctgttaaaactgaagttatctggcaaggggaaatcggttacatgtgatacgttaaatagatcaagggcttcttctttcttatgccggtcaagagaaacacaaactgcagaaacagaagaacgtgtaagccgcaatgaagattgcccggataatttcagtagaactgagggtggagatggacaacacattcatcctgtgagaaatggtatcacaaaccgggcattagctgaagcttgtaaatttgcttacaatgatgctagatttgttaatgaaagagccaggaatgacattttcttgctatcacgtggcattaggaagttggatgcccgggcacgccaagatgttgctattctgggttcgggatttttaaagcttgacgctcgggctagggaggatactgaaaaaattgacaatgatgtgaagaaaagagccgaacatcttcatcacattgccctcattctaaagaacaaagctcagtctaaattgaaaagcgttgctgatcgacattggagtgatggagctttagaggctgatctccgtcgtgctgactatatagccaagcagcgggcaatggaagatgccctcatggctttagagttcataaaagacgtccatgacatgatgatcagcaagatgtatgaactgaaaaatggagctttatcttccgatgacatggctggacaaataacacttgaaaagaatgggcaagtccttgactttttccctgggaaggtctcaactgatcgcattactgctattcaggaagcttatcgggatatggcatctgcactttccgaggctgatggaattgactatacagaccccgaagagcttgagttgttggttgcaacactaatggatctcgatgcaatggatggcaaaggtagtgtatcattattggcagagtgttcaagttctcctgatgtcaatacaagaaaagcattggctaatgctttatccgttgcaccatcgatgtggactcttggaaatgcaggcatgggggcattacagagactatcagaggacagcaacccaaccattgcagctgcagcatctaaaaccatttcagaactgaagagacagtgggagatagaagaaggtgacaactacagatttatgatgaatcaaattccattgccaaagctagactacaacgatgatgacgatgacgatgacgacgatgatgatacaatacaagactaa

SEQ ID NO: 652 - protein, 438 aa, Centaurea solstitialis
MAKVHGIIYSSVKNPHHPRLNGNAQGLVIREFSHGQLSLLKLKLSGKGKSVTCDTLNRSRASSFLCRSRETQTAETEERVSRNEDCPDNFSRTEGGDGQHIHPVRNGITNRALAEACKFAYNDARFVNERARNDIFLLSRGIRKLDARARQDVAILGSGFLKLDARAREDTEKIDNDVKKRAEHLHHIALILKNKAQSKLKSVADRHWSDGALEADLRRADYIAKQRAMEDALMALEFIKDVHDMMISKMYELKNGALSSDDMAGQITLEKNGQVLDFFPGKVSTDRITAIQEAYRDMASALSEADGIDYTDPEELELLVATLMDLDAMDGKGSVSLLAECSSSPDVNTRKALANALSVAPSMWTLGNAGMGALQRLSEDSNPTIAAAASKTISELKRQWEIEEGDNYRFMMNQIPLPKLDYNDDDDDDDDDDDTIQD

SEQ ID NO: 653 - DNA, 1305 bp, Glycine max
atggcactcgctgcaaacaaagtttctagcagtcctattgtgactaaaagaacagctctttgcagatcacatgaaaaacactatttttcctcgtcaacaaggatcaatagaatacagttgtcaagacatagactggaacatggacatctgaactatagatgtctccacacacagagatcaaccttattcaatgactggttttggttctttaacggaaaacctgttggtttgatctccaagaaatcttctatctcatgtaaatcaacaggagcaaataatactgaagagaaagaaagtattacaacttatgatgatagggcacataccaaagatgagaaaaatgatcacactcttgttgttcatggcttggctgatgcttgtagattcgtttgtaatgatgcaaagtttctctcacgtggcataatgaggttggatgctcgtgcacgtcaagatgttgcttttcttgggactgaatttctcaaacttgatgctcgggcaagagaggatactgagaaaattgaccgtgatgtcaaggaaaaagctagccgacttagtcatattgctactatattgaaggataaagctcagtccagattaaaaaatgctgctgatgagcattggagtgatggggccttagaggctgatttacgtcttgctgacttacgtgctaagcaacgtgcgatggaagatccccttatggccttggagcttatcaaaaacatccacaacaggatggtgagcaagatgtataactttccacttcgcagagataaaggatccctttcagaaaataatgtaagaggtcgaataatgcttgaaaagaatggaaaaaccacaaattcctttcctggggatgtgaccacagaaaggattgctgctcttcaggaagcatactggagtatggcatcagcactttctgaggcagatggaatcgattacactgatcctgaagagcttgagttgttggtcagaactcttatagatctggatgcaatggatggtaaacaaagtgtttctttgttggcagagtgttctagttcccctgatgtcagcactagacgggctttagcgaatgcattggcagcagcaccatccatgtggactcttggaaatgcagggatgggggcattacagagactggcagaagatagcaacccagccattgctgccgcagcatccaaagctatttatgaactgaaaaaacaatgggaaatagaggaaggcgatagctggaggttcatgatggatgaaaacaccatggaagaaaaaggaagcatagaatctgataatgaagataccaaatga

SEQ ID NO: 654 - protein, 434 aa, Glycine max
MALAANKVSSSPIVTKRTALCRSHEKHYFSSSTRINRIQLSRHRLEHGHLNYRCLHTQRSTLFNDWFWFFNGKPVGLISKKSSISCKSTGANNTEEKESITTYDDRAHTKDEKNDHTLVVHGLADACRFVCNDAKFLSRGIMRLDARARQDVAFLGTEFLKLDARAREDTEKIDRDVKEKASRLSHIATILKDKAQSRLKNAADEHWSDGALEADLRLADLRAKQRAMEDPLMALELIKNIHNRMVSKMYNFPLRRDKGSLSENNVRGRIMLEKNGKTTNSFPGDVTTERIAALQEAYWSMASALSEADGIDYTDPEELELLVRTLIDLDAMDGKQSVSLLAECSSSPDVSTRRALANALAAAPSMWTLGNAGMGALQRLAEDSNPAIAAAASKAIYELKKQWEIEEGDSWRFMMDENTMEEKGSIESDNEDTK

SEQ ID NO: 655 - DNA, 1260 bp, Helianthus annuus
atggctaaagttcctggggtcatctactcatcggttaaaagtccccatcatcccagcttaaacagtaatagtcaaggattggtaccaaagaaattcggccatggcctactttctaagttcaaattaaagttatcgaccaaggagaaactaaatacgcctgaacattttacaacttcgttcatatgtcggtcaagagacgcacaaactgcagaaacacaagaaagtgtaagccagaatgaagattgctctgatactatcagaactcaaggcagaaacggacagcacattcatgctgagagaattaatgacagaaaccaagcattagctgaagcttgtaaatttgcttacaatgatgctagatatgtcaatgaaagggctaaaaacgacattatcttgctttctcgtggcattaggagattggatgctcgggcgcgccaagatgttgctatcttaggttcgggatttttaaaactagatgctcgagcaagggaagacactgaaaaaattgacaacgatgtgaagaaaagagctgagcatctacatcacattgcccttgttttacaaaacaaagctcattctaaattgaaaagcgttgctgatcgacattggagtgatggagctttagaggcggatctcagacgtgctgactatatagccaagcaacgagcaatggaagatgccctcatggctttagagtttatgaaagatgtacacgacatgatgattagcaagatgtacaaactgagaaatggagctctatcttttgatgacatggcaggccaaataacacttgaaaagaatggaaaagtcctcgactttttccctggggaggtgtcaactgatcgcattactgctcttcaggaagcttatcaggatatggcatctgcactctcagaggctgatggaattgactacaatgaccctgaagaacttgagttgttggttgccacactgatggatcttgatgcaatggatggtaaaggtagtgtatcattattggtagagtgctcaagttctccagacgtcaatacaagaaaagcattggctaatgctctatccgttgcaccatcgatgtggactcttggaaatgcaggcatgggagctttacagagactggcagaagatagcaacccaaccattgcagccgcagcatctaaaaccatcgcagaactgaagagacaatgggagatagaagaaggcgacaactatagaattatgatgaatcaaattccattgcgtgatgcagactacaacatttag

SEQ ID NO: 656 - protein, 419 aa, Helianthus annuus
MAKVPGVIYSSVKSPHHPSLNSNSQGLVPKKFGHGLLSKFKLKLSTKEKLNTPEHFTTSFICRSRDAQTAETQESVSQNEDCSDTIRTQGRNGQHIHAERINDRNQALAEACKFAYNDARYVNERAKNDIILLSRGIRRLDARARQDVAILGSGFLKLDARAREDTEKIDNDVKKRAEHLHHIALVLQNKAHSKLKSVADRHWSDGALEADLRRADYIAKQRAMEDALMALEFMKDVHDMMISKMYKLRNGALSFDDMAGQITLEKNGKVLDFFPGEVSTDRITALQEAYQDMASALSEADGIDYNDPEELELLVATLMDLDAMDGKGSVSLLVECSSSPDVNTRKALANALSVAPSMWTLGNAGMGALQRLAEDSNPTIAAAASKTIAELKRQWEIEEGDNYRIMMNQIPLRDADYNI

SEQ ID NO: 657 - DNA, 1263 bp, Ipomoea batatas
atggccaaacctaatgggattatctattcttctccaaagtcacctcagcatccgaaaatatatgccaaaactcaagtgattgagcatagcacacaaagcaatggctatctctcaatgttaagactcaagttgtctaataagggattctggcgagcttatagggcaccaagtggctacattgctacccgaggatcttctcttcggtgccattctgcagaaacgcgccatgctgaaacagaagaatgtgttagagagtatcgtgatagttcagacacatctagtatgcaaggaaaagataaggatccagcctcacttggaaaatctggtactccaagtccgggattagccgaagcttgtaaatttgtttacaatgatgcaaaatttgtgaacgaaagggctaagaacgacattgtgttgctctctcgtggaataatgaggttggatgctcgtgcacgccaagatgttgcttttctcggttcagaatttcttaaacttgatgcccgagctagagaacacacggagaagattgacaatgatgtcaagagaaaagcggaaaggcttcatcatgttgccactattctcaagaacaaagctcaatcaagattgaagaatgctgctgaccgccattggagcgatggtgctttagaggctgatttgcgacgtgctgattttgctgccaaacaacgtgcaatggaagatgccttaatggctttagagtttgtcaaaaacatccacgatatgatggtgagcaagatgtgcaatttgaaaagaagctctctgaatcccaacaaaatgactgagcgcataacactagagaagaacgggaaaatgcttaactttcttcctggggaagtgtctgctgagcgtattagtgctattcaggaagcgtattgggatatagcagctgcactttctgaagcggatgggattgactacactgatcctgaagagctagagttgttagttgcaacgttaatagatctcgatgcaatggatggtaaaagtagcgtgtctctgttggccgagtgttcgagttctcccgatgtcaatacaaggaaagcattagctaatgcactatcggctgcaccatccatgtggactctgggaaatgcgggcatgggagctttgcagagacttgcagaagatacaaccctgaatcgctgctgctgcatcgaaaaccatcaacgaattgaagaggcagtgggaaatcgaggagggggacagctggaggttcatggtgaacgaaaaatcaccagaagatga

SEQ ID NO: 658 - protein, 420 aa, Ipomoea batatas
MAKPNGIIYSSPKSPQHPKIYAKTQVIEHSTQSNGYLSMLRLKLSNKGFWRAYRAPSGYIATRGSSLRCHSAETRHAETEECVREYRDSSDTSSMQGKDKDPASLGKSGTPSPGLAEACKFVYNDAKFVNERAKNDIVLLSRGIMRLDARARQDVAFLGSEFLKLDARAREHTEKIDNDVKRKAERLHHVATILKNKAQSRLKNAADRHWSDGALEADLRRADFAAKQRAMEDALMALEFVKNIHDMMVSKMCNLKRSSLNPNKMTERITLEKNGKMLNFLPGEVSAERISAIQEAYWDIAAALSEADGIDYTDPEELELLVATLIDLDAMDGKSSVSLLAECSSSPDVNTRKALANALSAAPSMWTLGNAGMGALQRLAEDTTLNRCCCIENHQRIEEAVGNRGGGQLEVHGERKITRR

SEQ ID NO: 659 - DNA, 1071 bp, Lactuca sativa
atggctaaagttcatgggatcatctactcttctgttaaaagtcctcatcatcccacatcaaacagtaacactcaaggattggtaccaaagaagttcagccatgggcaaagttctgtgttaaaactgaagttatcaggaaagacaaaactgaatacatttgaaaaaacaattagttcagtcacttcacgtgcttattctttcttatgtcgatcaagaaaatcacaaactacagaaacagaagaacgtgtaaaccacaatgaagattgctctgacaatttcagaactcaaggaggacatgaacaacatatgcatccagaaagaattggcatcacaaacaaggcattagctgaagcttgtaaatatgcttacaatgatgctagatttgtcaatgaaagggccaaaaacgacatttacttactttcacgtggcattatgaggttggatgctcgggcacgccaagatgttgctattcttggtttaggatttttaaaacttgatgctcgggctagagaggacactgaaaaaattgacaataatgtgaagaaaagagctgagcgacttcatcacatcgcccttattttaaaaaacaaagctgaatccaaattgaaaagcgttgctgaccgacattggagtgatggagctttagaggctgatctccggcgtgctgactatatagccaaaaagcgagccatggaagatgccctcatggctttagagtttatcaaagatgttcaagacatgatgatgagcaagatgtataagctgaaaaatggtgctttgtcatctgatgacatggcgggtcaaataacacttgaaaagaatgggaaagttctagactttttccctggtgaggtgtcaactgatcgcattactgctattcaggaggcttatcgggatatggcatctgcactttccgaagctgatggaattgactatactgaccctgaagagctggagttgttggttgcaacattgatggatcttgatgcaatggatggtaaagggagtgtgtcgttattggcagagtgttcaagttctcctgatgtcaatacaagaaaaacattgggctaa

SEQ ID NO: 660 - protein, 356 aa, Lactuca sativa
MAKVHGIIYSSVKSPHHPTSNSNTQGLVPKKFSHGQSSVLKLKLSGKTKLNTFEKTISSVTSRAYSFLCRSRKSQTTETEERVNHNEDCSDNFRTQGGHEQHMHPERIGITNKALAEACKYAYNDARFVNERAKNDIYLLSRGIMRLDARARQDVAILGLGFLKLDARAREDTEKIDNNVKKRAERLHHIALILKNKAESKLKSVADRHWSDGALEADLRRADYIAKKRAMEDALMALEFIKDVQDMMMSKMYKLKNGALSSDDMAGQITLEKNGKVLDFFPGEVSTDRITAIQEAYRDMASALSEADGIDYTDPEELELLVATLMDLDAMDGKGSVSLLAECSSSPDVNTRKTLG

SEQ ID NO: 661 - DNA, 1284 bp, Medicago truncatula
atggcacttacggcaaacaaagtttcaagcggtcctatcttgactaatagagcaacactttgtagatcacatggatcttcatcaccaaggataaacagaatacagttttcaaagggtagactcgaaaacggacatctgaacaacgattctgtcctcaatgagagatcaaccttatcgaatgactggtttcggtttgtcaatggaagaaatccagttagtttaatctccaagacatcttctgtctcatgtaaatcaacaggagcaaataataccgaagaaaaagaatgtgttacaacttatgatgatgtttctgatttaactaggagacatgccgaagatgagaaaaatgaccgtgctcgttctgttcgtggcctgtctgaagcttatagatttgcctgtaacgatgcaaagtttctctcacgtggcataatgaggatggatgagcgtgcgcgccaagatgttgcctttttagggacagaatttctcaaacttgatgctcgggcaagaaaggatactgagaaaatcgaccgtggagtcaaagaaaaagctaagcgccttaatcgtattgctactatcttgaaggatatcgctcagaccagattgaaaagtgctgccgatgagcactggagtgacggggccttagaggctgatttgcgccttgctgacttccgagccaaacaacgtgccatggaagatgcccttatgtctttggagctgatcaaaaacatccatgatatgatggtgagcaagacgtataactttcctattttcagagataagggctctctttcagaaaataatgtcagaggtcgaatcatgcttgaaaagaacggaagaaccacaaattcctttcctggggatgtgacggcagaacggatcactgcccttcaggaagcttactggagtatggcatcagcactttctgaagcagatggaattgattacactgatcctgaagagcttgagttgttgatcacaactcttatagaccttgatgcaatggatggtaaacaaagcgtgtctttgttggcagagtgctcgagttcccccgatgtcagtactagacgagctttagccaaggcactggcggcagcaccgtctatgtggactcttggaaatgcagggatgggggcattacagaggctggccgaggatagcaatccagccattgcagctgctgcatccaaagctatttatgaactgaaaaagcaatgggaaatagaagaaggggatagttggaggtttatgatgggtgaaagcaccaaggaagaaaatgaaacctga

SEQ ID NO: 662 - protein, 427 aa, Medicago truncatula
MALTANKVSSGPILTNRATLCRSHGSSSPRINRIQFSKGRLENGHLNNDSVLNERSTLSNDWFRFVNGRNPVSLISKTSSVSCKSTGANNTEEKECVTTYDDVSDLTRRHAEDEKNDRARSVRGLSEAYRFACNDAKFLSRGIMRMDERARQDVAFLGTEFLKLDARARKDTEKIDRGVKEKAKRLNRIATILKDIAQTRLKSAADEHWSDGALEADLRLADFRAKQRAMEDALMSLELIKNIHDMMVSKTYNFPIFRDKGSLSENNVRGRIMLEKNGRTTNSFPGDVTAERITALQEAYWSMASALSEADGIDYTDPEELELLITTLIDLDAMDGKQSVSLLAECSSSPDVSTRRALAKALAAAPSMWTLGNAGMGALQRLAEDSNPAIAAAASKAIYELKKQWEIEEGDSWRFMMGESTKEENET

SEQ ID NO: 663 - DNA, 1383 bp, Populus euphratica
atggcacttaatgcaagcaaggtttcaagcagcccttttgtgactaaaaggaaacttacctctacgtctcatggaatcatatgttccttttccaagtcattccaaaaaaataaactacaccctactcatcaaggaattgagctccaacaactgagcagtaagcatctgttgacagcaaaatcggccttctctggtgagagtttgcagggcattcatggaaaaccagttagtctcatcatctctcgcagatcttccacattatgccagtcgacaagaactcatagaactgaagaaaaagaatgtactagatcatacggtgacagttctgattcatccagggcacaaattggagaaaaggaagatgagcatcaactcatgtctgggagaactattcactcatgtcatgctttagctgaagcatgtagatttgtatataatgatgccaagtttgtaaatgaaagggctcgcaacgacattattttactttcacgtgggatatcaaggctggatgctcgtgcacgtaaaggtgttgcgattcttggttctgggtttcttaaactcgatgctcgagcaagagaggacactgagaaaattgaccgtgatgtgaaggaaaaggctgagcgtcttcatcacatcgctactatcataaaggacagagctcaaaccaaattgaaaacagctgctgacaagcattggagtgatggagccttggaggctgatttgcgccttgctgacttccgtgccaagcaacgtgcaatggaagatgctttaatggcgttggagtttgtcaaaaatatccatgacttgatggtgagcaagatgtacaaattcccactgcgtaaggaggaaggttcactaactgctaatggcatactgggaaatataatgcttgagaaaaatggtagggcactggacttcttccctggagaagtatcaacagatcgcattactgctattcaggaagcttactggagtatggcaactgcgctctccgaagctgatggaattgactatacagatcctgaagagctcgagttgttgattacaactcttatagatcttgatgcaatggatggtaagggtagtgtatcgttattggcagaatgttcaaattctccagatgtcaacacaagacaagcactggccaatgcgttggcagcagccccatccatgtggactcttggaaatgcagggatgggagccttacagagactggcagaagataataacccagccattgccaatgcagcatccaaaactatccatgagctgaagaaacagtgggaaatacaggaaggagatagttggaggttcatgatgaatcaagaaccagttgaagaagtagatagccaagaagacaataatgatgcagatacaggttga

SEQ ID NO: 664 - protein, 460 aa, Populus euphratica
MALNASKVSSSPFVTKRKLTSTSHGIICSFSKSFQKNKLHPTHQGIELQQLSSKHLLTAKSAFSGESLQGIHGKPVSLIISRRSSTLCQSTRTHRTEEKECTRSYGDSSDSSRAQIGEKEDEHQLMSGRTIHSCHALAEACRFVYNDAKFVNERARNDIILLSRGISRLDARARKGVAILGSGFLKLDARAREDTEKIDRDVKEKAERLHHIATIIKDRAQTKLKTAADKHWSDGALEADLRLADFRAKQRAMEDALMALEFVKNIHDLMVSKMYKFPLRKEEGSLTANGILGNIMLEKNGRALDFFPGEVSTDRITAIQEAYWSMATALSEADGIDYTDPEELELLITTLIDLDAMDGKGSVSLLAECSNSPDVNTRQALANALAAAPSMWTLGNAGMGALQRLAEDNNPAIANAASKTIHELKKQWEIQEGDSWRFMMNQEPVEEVDSQEDNNDADTG

SEQ ID NO: 665 - DNA, 909 bp, Physomitrella patens
atgtgtgcagctgcgcagaacattgatgaacgagctcgcaatgattttctgttgctttcacgagaaatattgcgactggacatgagagctcgtgagggtgttgcacttctgggctcagggtttttgaaacttgatgctcgtgcacgagaagacgtgctgaagctggatactcaagcacgcagggatatgttgcgtcttcgtcatattgctttggggttgacggagactgcttctatggaactaagtagtgctgctgaggaacattggagtgacggagctctggatgcggatttgcgcctggcagacttacgagctcgtcgtcgagctatggaagacctctacgctgctgtgctggtagtcaagaatgttcacgatgctctggtcagcacgttgaaaactaggtcagtagatgctagtaaggataacgcagaaaggggtgcagcagaagataatcaaggatttagaagctacctgcgaaacatcgatccgatggcagaaggactagtagcatttcaggatgcatactggaagatggcgtcagcgtttgttgaggcagagggcatggagtgcactgacccagatgagttagagtttatcgtggctgcgttgctagacatggaggaggttgacggtggaagtggggcgttgttagtgactgaaattgcaagctctcctgatgtagctactcgccttgcattggcagatgcactagctgatgcaccatcgttatggacgcttgggaatgcaggcatgggcgcacttcagaggttgtcgatggactccaacccgacggtggcagcagctgcgaccaaggctatcaatgaacttaagtcgcagtggagacaacaggaccaattaattttcccctaccggcagaaagatgaagatgaaccagaaatggggttgtga

SEQ ID NO: 666 - protein, 302 aa, Physomitrella patens
MCAAAQNIDERARNDFLLLSREILRLDMRAREGVALLGSGFLKLDARAREDVLKLDTQARRDMLRLRHIALGLTETASMELSSAAEEHWSDGALDADLRLADLRARRRAMEDLYAAVLVVKNVHDALVSTLKTRSVDASKDNAERGAAEDNQGFRSYLRNIDPMAEGLVAFQDAYWKMASAFVEAEGMECTDPDELEFIVAALLDMEEVDGGSGALLVTEIASSPDVATRLALADALADAPSLWTLGNAGMGALQRLSMDSNPTVAAAATKAINELKSQWRQQDQLIFPYRQKDEDEPEMGL

SEQ ID NO: 667 - DNA, 903 bp, Physomitrella patens
atgtgtactgttgcgcagaacatcgatgaacgggctcgtaatgattttttgatgttgttaagagaaatattgcgtcttgacatgagagctcgtgagggtgttgctcttctaggttcagggtttttgaaacttgatgcccgtgctcgagaagacgtggagaagctggatactcaagcacgcaaggatatgatgcgttttcgtcatattgctttggggttgacggagactgcttctatggagctgagtagtgctgcagaggaacattggaacgatggagctctggatgccgatttgcgtctggcagacttgcgagctcgtcgtcgagctatggaagatctatatgccgcattgcaggctgtgaagagtgttcacgatgccctggtcaggacgttgaaaattaggtcagtattatctgcaaaacagggatccaatgttagatcgctcaacaccaattcaggttggacagcttttcaaactggacctaccttaagcaagacacgagtgggttatctgcaggatgcatactggaagatggcgtcagcactagctgaggcagagggcatggagtgtactgatccagatgagctagagttcatcgtggctgcattgctggacatggaggaggtcgacggcggaggtggtgcgttgttagtgaccgaaagtgcgagctcccctgatgtagccactcgcctcgcattggcagatgcactatctgatgcaccatcattatggacgcttgggaacgcaggcatgggcgccctccagaggttatcgatggactccaatccagcagtggcagcagctgctagtaaggctatcaatgaactcaagtcacagtggagacaacaagaccaactaattttcccctacaggcagatagatgatgcatcagaaaacgaatag

SEQ ID NO: 668 - protein, 300 aa, Physomitrella patens
MCTVAQNIDERARNDFLMLLREILRLDMRAREGVALLGSGFLKLDARAREDVEKLDTQARKDMMRFRHIALGLTETASMELSSAAEEHWNDGALDADLRLADLRARRRAMEDLYAALQAVKSVHDALVRTLKIRSVLSAKQGSNVRSLNTNSGWTAFQTGPTLSKTRVGYLQDAYWKMASALAEAEGMECTDPDELEFIVAALLDMEEVDGGGGALLVTESASSPDVATRLALADALSDAPSLWTLGNAGMGALQRLSMDSNPAVAAAASKAINELKSQWRQQDQLIFPYRQIDDASENE

SEQ ID NO: 669 - DNA, 1380 bp, Poncirus trifoliata
atggcacttactgcaagcaaggtttcaaatggacctgttgtttcgaaggagataattacctctagatcacatggaattgtatattcttttgccaagacaacagtgcaacataaactatgtcctgctattcaaggagttgagcttcagcaactaagcgatggacatctttctgcaccaaaaatgagcttttccaacgagggtttgtctagcttatctgggaagcctattagctttgtctctagaaggtcttcgattttatgcttctcaaatggaacacgtaatgctgaagcaaaagaatgcattaggccttatggcgatagctctgatgtgtcaagtatgcaagttgcagaagatgaagacgagcatccagtcatgcctgggagaactattcactcaagtcaggttttagccgaagcttgcaaatttgtgtacaacgatgcaaaatttgttaatgaaagggcccgaaatgacattgtcttgctttctcgaagcattatgaggttggatgctcgagcacgtcaagacatggctattcttgggtctgagtttcttaagcttaatgctcgggcaagagaagatacagagaaaattgaccgtgatgtgaagcaaaaggccgaatgtcttcatcatatagctactatcttgaaagataaagccgagtctagattgaagcatgctgctgataagcactggagtgacggggccttggaggctgatctgcgccgtgctgacttccgtgccaagcaacgtgcaatggaagatgccctgatggcattggagtttctcaaaaatatccatgccatgatggtgagaaagatgtacaaattccctctgcgtagggaaaagatttctctttcagatcctgagatgatgggatgtataatgcttgagaaaaatgggaaaacacttgatttcttccccggggaagtgtctaccgatcgtattactgctattcaggaagcttattggagtatggcatctgccctttctgaagcagacggaattgactatactgatcccgaagagcttgagttgttggtcacaactcttataggtcttgatgcaatggatggaaaaagtagtgtgtcactattggcagagtgttcaagttctcctgatgtgcacactagacaagcattggcaaatgcattagcagctgctccttccatgtggactcttggaaatgctggcatgggggcattacagagactggctaaagatagcaaccctgcaattgctgccgcagcttccaaaacaatttttgaactgaagaagcagtgggaaatagaggaaggagatagctggaggtttatgatgaatccaaagccagctgagggggaagaaactgaagaagccagtgacgatgctgatacaaactga

SEQ ID NO: 670 - protein, 459 aa, Poncirus trifoliata
MALTASKVSNGPVVSKEIITSRSHGIVYSFAKTTVQHKLCPAIQGVELQQLSDGHLSAPKMSFSNEGLSSLSGKPISFVSRRSSILCFSNGTRNAEAKECIRPYGDSSDVSSMQVAEDEDEHPVMPGRTIHSSQVLAEACKFVYNDAKFVNERARNDIVLLSRSIMRLDARARQDMAILGSEFLKLNARAREDTEKIDRDVKQKAECLHHIATILKDKAESRLKHAADKHWSDGALEADLRRADFRAKQRAMEDALMALEFLKNIHAMMVRKMYKFPLRREKISLSDPEMMGCIMLEKNGKTLDFFPGEVSTDRITAIQEAYWSMASALSEADGIDYTDPEELELLVTTLIGLDAMDGKSSVSLLAECSSSPDVHTRQALANALAAAPSMWTLGNAGMGALQRLAKDSNPAIAAAASKTIFELKKQWEIEEGDSWRFMMNPKPAEGEETEEASDDADTN

SEQ ID NO: 671 - DNA, 564 bp, Poncirus trifoliata
atggaattcagccctctgcgtagggaaaagatttctctttcagatcctgagatgatgggatgtataatgcttgagaaaaatgggaaaacacttgatttcttccccggggaagtgtctaccgatcgtattactgctattcaggaagcttattggagtatggcatctgccctttctgaagcagacggaattgactatactgatcccgaagagcttgagttgttggtcacaactcttataggtcttgatgcaatggatggaaaaagtagtgtgtcactattggcagagtgttcaagttctcctgatgtgcacactagacaagcattggcaaatgcattagcagctgctccgtccatgtggactcttggaaatgctggcatgggggcattacagagactggctaaagatagcaaccctgcaattgctgccgcagcttccaaaacaatttttgaactgaagaagcagtgggaaatagaggaaggagatagctggaggtttatgatgaatccaaagccagctgagggggaagaaactgaagaagccagtgacgatgctgatacaaactga

SEQ ID NO: 672 - protein, 187 aa, Poncirus trifoliata
MEFSPLRREKISLSDPEMMGCIMLEKNGKTLDFFPGEVSTDRITAIQEAYWSMASALSEADGIDYTDPEELELLVTTLIGLDAMDGKSSVSLLAECSSSPDVHTRQALANALAAAPSMWTLGNAGMGALQRLAKDSNPAIAAAASKTIFELKKQWEIEEGDSWRFMMNPKPAEGEETEEASDDADTN

SEQ ID NO: 673 - DNA, 1383 bp, Populus trichocarpa
atggcacttaatgcaagcaaggtttcgagcagcccttttgtgactcaaaggaaacttacctctacatctcatggaatcatatgttccttttccaagtcattccaaaaaaataaactacaccctactcatcaaggaattgagcttcaacaactgagcagtaagcatctcttgacagcaaaattggccttctctggtgagagtttgcagggcatacatggaaaaccagttagtctcatcatctctcgcagatcttccacattatgccagtcaacaagaactcatagaactgaagaaaaagaatgtactagaccatacagtgacagttctgattcatccagggcacaagttggagaaaaggaagatgagcatcaactcatgtctgggagaactattcactcatgtcatgctttagctgaagcatgtagatttgtatataatgatgccaagtttgtaaatgaaagggctcgcaacgacattattttactttcacgtgggatatcaaggctggatgctcgtgcacgtaaaggtgttgcgattcttgggtctgggtttcttaaactcgatgctcgagcaagagaggacactgagaaaattgaccgtgatgtgaaggaaaaagctgagcgtcttcatcacattgctactatcataaaggacagagctcaaaccaaattgaaaactgctgctgacaagcattggagtgatggagccttggaggctgatttgcgccttgctgacttccgcgccaagcaacgtgcaatggaagatgctctaatggcgttggagtttgtcaaaaatatccatgaattgatggtgagcaagatgtacaaattcccgctgcgtaaggaggaaggttcactaactgctaatggcatactgggaaatataatgcttgagaaaaatggtaggacactggacttcttccctggagaagtatcaacagatcgcattactgctattcaggaagcttactggagtatggcatctgcgctctctgaagctgatggaattgactatacagatcctgaagagctcgagttgttggttacaactcttatagatcttgatgcaatggatggtaagggcagtgtatcgttattggcagaatgttcaaattctccagatgtcaacacaagacaagcactggccaatgcgttggcagcagccccatccatgtggactcttggaaatgcaggcatgggagccttacagagactggcagaagataaaaacccagccattgccaatgcagcatccaaaactatccatgagctgaagaaacagtgggaaatacaggaaggagatagttggaggtttatgatgaatcaaaaaccagttgaagaagtagatagccaagaagacaataacgacgcagatacaggttga

SEQ ID NO: 674 - protein, 460 aa, Populus trichocarpa
MALNASKVSSSPFVTQRKLTSTSHGIICSFSKSFQKNKLHPTHQGIELQQLSSKHLLTAKLAFSGESLQGIHGKPVSLIISRRSSTLCQSTRTHRTEEKECTRPYSDSSDSSRAQVGEKEDEHQLMSGRTIHSCHALAEACRFVYNDAKFVNERARNDIILLSRGISRLDARARKGVAILGSGFLKLDARAREDTEKIDRDVKEKAERLHHIATIIKDRAQTKLKTAADKHWSDGALEADLRLADFRAKQRAMEDALMALEFVKNIHELMVSKMYKFPLRKEEGSLTANGILGNIMLEKNGRTLDFFPGEVSTDRITAIQEAYWSMASALSEADGIDYTDPEELELLVTTLIDLDAMDGKGSVSLLAECSNSPDVNTRQALANALAAAPSMWTLGNAGMGALQRLAEDKNPAIANAASKTIHELKKQWEIQEGDSWRFMMNQKPVEEVDSQEDNNDADTG

SEQ ID NO: 675 - DNA, 1134 bp, Solanum lycospersicon
atggctaccccaaatgggatcatttattattctgctaaatcacctcaacacccaaaggttcacacccacagccaagggactgaacatagcaaacacaacggatattctaatatgccaagactgaagttttctaataagaggttctgggaggcatgcggaaaactaagcaaccgtgtcatcttcaggggatctcctgtgttatgtctctcaacagaaacacgcgacactgagacagagtgtgccagaaacagtgatgattgttccaatatatctagtgtacaagaaaatgatcaagcaaccacagttgggaaagttattccttcaagtcaggcaattgcagaagcttgtaaatttgcttacaacgatgccaaatttgtgaatgaaagggcgaagaatgatattgtgctgctttctcgggaaataatgagaatggatgcccgtgcgcgccaagatgttgcatttcttggttcagagtttcttaagcttgatgctcgggcacgggaagatactgagaaagttgatcacaatgtaaagaaaagagccgaaagaatccagcatgttgccactattcttaaaaacatagctcaaacgagactgaagaaagctgctgatcgacactggagcgatggtgccttggaggctgatttaagacgtgccgattttgtggcaaaacagcgtgcaatggaggattctctgatggctctggagtttgtcaagaacattcatgataggatggtgagcaagatgtgcaaattgaaaagaagttccatcgatacggagaaaacaaggcatattactctagagaagaatgggaaaactctggagtttcttcctggggaagtttcagctgatcgcctcactgctatccaggaagcatattgggatatagcatctgcactttccgaagctgatggaattgactatactgatccagaagagctcgagttgttggtagcaacgcttatagatcttgatgcaatggatggtaaaagtagtgtatccttgctggccgagtgttcaagttctcctgatgtgaacacaaggaaagcattagcaaatgcacttgcagctgcaccgtccatgtggactttaggaaacgctggcatgggagcgttacagactagcagaagatga

SEQ ID NO: 676 - protein, 377 aa, Solanum lycospersicon
MATPNGIIYYSAKSPQHPKVHTHSQGTEHSKHNGYSNMPRLKFSNKRFWEACGKLSNRVIFRGSPVLCLSTETRDTETECARNSDDCSNISSVQENDQATTVGKVIPSSQAIAEACKFAYNDAKFVNERAKNDIVLLSREIMRMDARARQDVAFLGSEFLKLDARAREDTEKVDHNVKKRAERIQHVATILKNIAQTRLKKAADRHWSDGALEADLRRADFVAKQRAMEDSLMALEFVKNIHDRMVSKMCKLKRSSIDTEKTRHITLEKNGKTLEFLPGEVSADRLTAIQEAYWDIASALSEADGIDYTDPEELELLVATLIDLDAMDGKSSVSLLAECSSSPDVNTRKALANALAAAPSMWTLGNAGMGALQTSRR

SEQ ID NO: 677 - DNA, 1356 bp, Vitis vinifera
atggcactaactgcgagcaagttttcaagtagtcctgtggcgaccgacaggacaagtatctctaaatcgcaaggaactatttcttcattttccaaatcaataaaacattgtgggttgcattctaaaaatcaaggagttgagcttaggcgacagagcagtggacatctcttgactgctagatatagattttccaacaagggtttctggcacatatgtggaaaaactggtcattatttttcctctaggggatcttctgtgttatgctggttaacagggacacataagactgaagcaaaacaatgtgttgaacattatagtgatcgttctgatataccaagtgtacaacttgaagatgaggaagacgagaatctggtcatgcctgaacgaatcattcactcaaatcagggtttagctgaagcttgtaaatttgtctacaatgatgcaaaatttgtaaatgaaagggctcgtaatgacatggtcttgctttctcgtggcataatgaggttggatgcccgtgcacgccaagatgttgctattcttgggtcagagtttcttaagcttgatgctcgggcaagagaagatactgagaaaattgaccatggtgtgaagaaaaaggctgaacgtcttcatcatattgctactattttgaaagacaaagcgcagtctagattgaaaagtgcagctgacaagcattggagtgatggagcattggaggctgatttgcgccgtgctgacttttgtgccaaacaacgtgcaatggaagatgccctaatggccttagagtttgtaaaaaatatccatgacatgatggtgagcaaaatgtacaagttgaaaaaaggtactccatcatctaatgacacaatgggacatataatgctcgaaaagaatggaaaaactcttgatttcttccctggggaagtgtccactgatcgcattaccgctattcaggaagtttacttgagtatggcctcggctctctctgaagctgatggaattgactatactgatcctgaagagcttgagttgttagttacaactcttatcgatcttgatgcaatggatggtaaaagcagtgtttcactgttggcagagtgttcaagttctcctgatgtcaatactagacaagcattagccaatgcattggcagctgccccatccatgtggactcttggaaatgcaggcatgggagcattgcagagactggcagaagatagcaatcctgcaattgctgtcgcagcatcaaaagctatttatgaactgaagaaacagtgggaaatagaagaaggggacagttggaggttcacaatgaatcaaaagccaatgaaagaagctgatgatgtagaagatactgactaa

SEQ ID NO: 678 - protein, 451 aa, Vitis vinifera
MALTASKFSSSPVATDRTSISKSQGTISSFSKSIKHCGLHSKNQGVELRRQSSGHLLTARYRFSNKGFWHICGKTGHYFSSRGSSVLCWLTGTHKTEAKQCVEHYSDRSDIPSVQLEDEEDENLVMPERIIHSNQGLAEACKFVYNDAKFVNERARNDMVLLSRGIMRLDARARQDVAILGSEFLKLDARAREDTEKIDHGVKKKAERLHHIATILKDKAQSRLKSAADKHWSDGALEADLRRADFCAKQRAMEDALMALEFVKNIHDMMVSKMYKLKKGTPSSNDTMGHIMLEKNGKTLDFFPGEVSTDRITAIQEVYLSMASALSEADGIDYTDPEELELLVTTLIDLDAMDGKSSVSLLAECSSSPDVNTRQALANALAAAPSMWTLGNAGMGALQRLAEDSNPAIAVAASKAIYELKKQWEIEEGDSWRFTMNQKPMKEADDVEDTD

SEQ ID NO: 679 - DNA, 867 bp, Citrus clementina
atggcacttactgcaagcaaggtttcaaatggacctgttgtttcgaaggagataattacctctagatcacatggaattgtatattcttttgccaagacaacagtgcaacataaactatgtcctgctattcaaggaattgagcttcagcaactaagcgatggacatctttctgcaccaaaaatgagcttttccaatgagggtttgtctagcttatctgggaagcctattagctttgtctctagaaggtcttcgattttatgcttctcaaatggaacacgtaatgctgaagcaaaagaatgcattaggccttatggcgatagctctgatgtgtcaagtatgcaagttgcagaagatgaagatgagcatccagtcatgcctgggagaactattcactcaagtcaggttttagccgaagcttgcaaatttgtgtacaacgatgcaaaatttgttaatgaaagggcccgaaatgacattgtcttgctttctcgcattatgaggttggatgctcgtgcacgtcaagacatggctattcttgggtctgagtttcttaagcttaatgctcgggcaagagaagatacagagaaaattgaccgtgatgtgaagcaaaaggccgaatgtcttcatcatatagctactatcttgaaagataaagccgagtctagattgaagcatgctgctgataagcactggagtgacggggccttggaggctgatctgcgccgtgctgacttccgtgccaagcaacgtgcaatggaagatgccctgatggcattggagtttctcaaaaatatccatgacatgatggtgagaaagatgtacaaattccctctgcgtagggaaaagattctctatcagatcctgagatga

SEQ ID NO: 680 - protein, 288 aa, Citrus clementina
MALTASKVSNGPVVSKEIITSRSHGIVYSFAKTTVQHKLCPAIQGIELQQLSDGHLSAPKMSFSNEGLSSLSGKPISFVSRRSSILCFSNGTRNAEAKECIRPYGDSSDVSSMQVAEDEDEHPVMPGRTIHSSQVLAEACKFVYNDAKFVNERARNDIVLLSRIMRLDARARQDMAILGSEFLKLNARAREDTEKIDRDVKQKAECLHHIATILKDKAESRLKHAADKHWSDGALEADLRRADFRAKQRAMEDALMALEFLKNIHDMMVRKMYKFPLRREKILYQILR

SEQ ID NO: 681 - DNA, 873 bp, Citrus clementina
atggcacttactgcaagcaaggtttcaaatggacctgttgtttcgaaggagataattacctctagatcacatggaattgtatattcttttgccaagacaacagtgcaacataaactatgtcctgctattcaaggaattgagcttcagcaactaagcgatggacatctttctgcaccaaaaatgagcttttccaatgagggtttgtctagcttatctgggaagcctattagctttgtctctagaaggtcttcgattttatgcttctcaaatggaacacgtaatgctgaagcaaaagaatgcattaggccttatggcgatagctctgatgtgtcaagtatgcaagttgcagaagatgaagatgagcatccagtcatgcctgggagaactattcactcaagtcaggttttagccgaagcttgcaaatttgtgtacaacgatgcaaaatttgttaatgaaagggcccgaaatgacattgtcttgctttctcgaagcattatgaggttggatgctcgtgcacgtcaagacatggctattcttgggtctgagtttcttaagcttaatgctcgggcaagagaagatacagagaaaattgaccgtgatgtgaagcaaaaggccgaatgtcttcatcatatagctactatcttgaaagataaagccgagtctagattgaagcatgctgctgataaacactggagtgacggggccttggaggctgatctgcgccgtgctgacttccgtgccaagcaacgtgcaatggaaaatgccctgaaggcattggaatttctcaaaaatatccatgacatgatggtgagaaagatgaacaaattccctctgcctaagggaaaagatttctctaaccaaatcctgaaatga

SEQ ID NO: 682 - protein, 290 aa, Citrus clementina
MALTASKVSNGPVVSKEIITSRSHGIVYSFAKTTVQHKLCPAIQGIELQQLSDGHLSAPKMSFSNEGLSSLSGKPISFVSRRSSILCFSNGTRNAEAKECIRPYGDSSDVSSMQVAEDEDEHPVMPGRTIHSSQVLAEACKFVYNDAKFVNERARNDIVLLSRSIMRLDARARQDMAILGSEFLKLNARAREDTEKIDRDVKQKAECLHHIATILKDKAESRLKHAADKHWSDGALEADLRRADFRAKQRAMENALKALEFLKNIHDMMVRKMNKFPLPKGKDFSNQILK

SEQ ID NO: 683 - DNA, 912 bp, Citrus clementina
atggcacttactgcaagcagggtttcaaatggacctgttgtttcgaaggagataattacctctagatcacatggaattgtatattcttttaccaagacggcagtgcaacataaactatgtcctgctattcaaggaattgagcttcagcaagtaagcgatggacatctttctgcacaaaaaatgagcttttccaatgacggtttgtctagcttatctcggaagcctattagctttgtctctagaaggtcttcgattttatgcttctcaaatggaacacgtaatgctgaagcaaaagaatgcattagaccttatggcgatagctctgatgtgtcaagtatgcaagttgcagaagatgaagatgagcatccagtcatgcctgggagaactattcactcaagtcaggttttagctgaagcttgcaaatttgtgtacaacgatgcaaaatttgttaatgaaagggcccgaaatgacattgtcttgctttctcgaagcattatgaggttggatgctcgcgcacgtcaagacatggctattcttgggtctgagtttcttaagcttaatgctcgggcaagagaagatacagagaaaattgaccgcgatgtgaagcaaaaggccgaatgtcttcatcatatagctactatcttgaaagataaagccgagtctagattgaagcatgctgctgataagcactggagtgacggggccttggaggctgatctgcgccgtgctgacttccgtgccaagcaacgtgcaatggaagatgccctgatggcattggagtttctcaaaaatatccatgacatgatggtgagaaagatgtacaaattccctctgcgtagggaaaagatttctctatcagatcctgagatgatgggatgtataatgcttgaagaaaaatgggaaaacacttga

SEQ ID NO: 684 - protein, 303 aa, Citrus clementina
MALTASRVSNGPVVSKEIITSRSHGIVYSFTKTAVQHKLCPAIQGIELQQVSDGHLSAQKMSFSNDGLSSLSRKPISFVSRRSSILCFSNGTRNAEAKECIRPYGDSSDVSSMQVAEDEDEHPVMPGRTIHSSQVLAEACKFVYNDAKFVNERARNDIVLLSRSIMRLDARARQDMAILGSEFLKLNARAREDTEKIDRDVKQKAECLHHIATILKDKAESRLKHAADKHWSDGALEADLRRADFRAKQRAMEDALMALEFLKNIHDMMVRKMYKFPLRREKISLSDPEMMGCIMLEEKWENT

SEQ ID NO: 685 - DNA, 855 bp, Carthamus tinctorius
atggctaaagtacatgggatcatttactcatcggttaaaaatccacatcatcccagactaaatggtaatactcaaggattggtaataaggaagttcagccatgggcagctttctctgttaaaactgaagttatctggcaagcggaaaccggttacatgtgattcgttaaatagatcaagggcttcttctttcttatgtcggtcgagagaaacacaaactgcagaaacagaagaatgtgtaagccacactgaagattgcccagataatttcagaactgagggcggagatggagaacacattcatcctgtgagaaatggtgtcacaaaccgggcattagctgaagcttgtagatttgcttacaatgatgctaaatttgttaatgaaagagccaggaatgacattttcttgctatctcgtggcattaggaagttggatgctcgggcacgccaagatgttgctattctaggttctggatttttaaagcttgatgctcgggctagggaggatactgaaaaaattgacaatgatgtgaagaaaagagccgagcatcttcatcacattgccctcattttgaagaacaaagctcagtctaaattgaaaagcgttgctgatcgacattggagtgatggagctttagaggctgatctccggcgtgctgactatatagccaagcagcgggcaatggaagatgccctcatggctttagagttcataaaagacgtccacgacatgatgatgagcaagatgtatgaactgaaaaatggagctttgtcttccgatgacatggcagggcaaataacacttgaaaagaatgggcaagtccttgactttttaccctgggaaggtctcgactga

SEQ ID NO: 686 - protein, 284 aa, Carthamus tinctorius
MAKVHGIIYSSVKNPHHPRLNGNTQGLVIRKFSHGQLSLLKLKLSGKRKPVTCDSLNRSRASSFLCRSRETQTAETEECVSHTEDCPDNFRTEGGDGEHIHPVRNGVTNRALAEACRFAYNDAKFVNERARNDIFLLSRGIRKLDARARQDVAILGSGFLKLDARAREDTEKIDNDVKKRAEHLHHIALILKNKAQSKLKSVADRHWSDGALEADLRRADYIAKQRAMEDALMALEFIKDVHDMMMSKMYELKNGALSSDDMAGQITLEKNGQVLDFLPWEGLD

SEQ ID NO: 687 - DNA, 813 bp, Gossypium hirsutum
atggcatttacttcaagcaaggtcccaaatgggtcagttgtgactaagactattggtaacactaaccatcgtggtaaaatctatcctataactcgagggtttgatcgtcggagactgagaaatacaggtcttttgatggcgaagttgaggtttccaaacgaacgtttgggaaacatatatgaaaaaactggtggtttcggtgtcactcgaggatcttccttgatatgcttgtcctcaagaactcaaaagtctgaaactgattgctcggatgcatctagtgcacagattgccgaagacgaagtcggtcattcaagcatgcatgggagaaccatacattcaagtcccggcttggctgaagcttgtagattcgcttgtaatgatgcaaagtttgtaaatgaaagggctcgtaacgacattgttttgctttctcgtggaataatgaggttggatgctcgtgctcgtcaggatgtcgctattctcgggtcaggatttcttaaactcgatgctagggcaagagaagatacagaaaaaattgaccgaggtgtgaagaaaaaggccgaacgtcttcaccatattgccactatcttaaaagccaaggccgaatctagattgaaaaaggccgctgataaacattggagtgacggtgcattagaggctgatctgcgccgtgccgatttccgtgctaagcaacgtgctatggaggatgctctaatggctttggagtttgtgaaaaacattcatgacatgatggtgagcaaggggtacaaattccattgcgatgggaaaaaggttcactatcagctaatgacttga

SEQ ID NO: 688 - protein, 270 aa, Gossypium hirsutum
MAFTSSKVPNGSVVTKTIGNTNHRGKIYPITRGFDRRRLRNTGLLMAKLRFPNERLGNIYEKTGGFGVTRGSSLICLSSRTQKSETDCSDASSAQIAEDEVGHSSMHGRTIHSSPGLAEACRFACNDAKFVNERARNDIVLLSRGIMRLDARARQDVAILGSGFLKLDARAREDTEKIDRGVKKKAERLHHIATILKAKAESRLKKAADKHWSDGALEADLRRADFRAKQRAMEDALMALEFVKNIHDMMVSKGYKFHCDGKKVHYQLMT

SEQ ID NO: 689 - DNA, 873 bp, Lactuca saligna
atggctaaagttcatgggatcatctactcttctgttaaaagtcctcatcatcccacatcaaacagtaacactcaaggattggtaccaaagaagttcagccatgggcaaagttctgtgttaaaactgaagttatcaggaaagacaaaactgaatacatttgaaaaaacaattagttcagtcacttcacgtgcttattctttcttatgtcgttcaagaaaatcacaaactacagaaacagaagaacgtgtaaaccacaatgaagattgctctgacaatttcagaactcaaggaggacatgaacaacatatgcatccagaaagaattggcatcacaaacaaggcattagctgaagcttgtaaatatgcttacaatgatgctagatttgtaaacgaaagggccaaaaacgacattttcttactttcacgtggcattatgaggttggatgctcgggcacgccaagatgttgctattcttggtttaggatttttaaaacttgatgctcgggctagagaggacactgaaaaaattgacaataatgtgaagaaaagagctgagcgacttcatcacattgcccttattttaaaaaacaaagctgaatccaaattgaaaagcgttgctgaccgacattggagtgatggagctttagaggctgatctccgtcgtgctgactatatagccaaacagcgagccatggaagatgccctcatggctttagagtttatcaaagatgtttcagacatgatgatgagcaagatgtataagctgaaaaatggtgctttgtcatctgatgacatggcgggtcaaataacacttgaaaagaatgggaaggtctagactttttcctggggagtgtcaactgatcgcattactgct

SEQ ID NO: 690 - protein, 290 aa, Lactuca saligna
MAKVHGIIYSSVKSPHHPTSNSNTQGLVPKKFSHGQSSVLKLKLSGKTKLNTFEKTISSVTSRAYSFLCRSRKSQTTETEERVNHNEDCSDNFRTQGGHEQHMHPERIGITNKALAEACKYAYNDARFVNERAKNDIFLLSRGIMRLDARARQDVAILGLGFLKLDARAREDTEKIDNNVKKRAERLHHIALILKNKAESKLKSVADRHWSDGALEADLRRADYIAKQRAMEDALMALEFIKDVSDMMMSKMYKLKNGALSSDDMAGQITLEKNGKVTFSWGVSTDRITA

SEQ ID NO: 691 - protein, 50 aa, Artificial sequence
  motif 22
  VARIANT (4)..(4): / replace = "Arg"
  VARIANT (17)..(17): / replace = "Leu"
  VARIANT (21)..(21): / replace = "Val"
  VARIANT (22)..(22): / replace = "Val"
  VARIANT (23)..(23): / replace = "Arg"
  VARIANT (24)..(24): / replace = "Arg"
  VARIANT (31)..(31): / replace = "Phe"
  VARIANT (35)..(35): / replace = "Lys"
  VARIANT (37)..(37): / replace = "Ile"
  VARIANT (39)..(39): / replace = "Asp"
  VARIANT (40)..(40): / replace = "Val"
  VARIANT (46)..(46): / replace = "Asn"
  VARIANT (47)..(47): / replace = "Arg"
  VARIANT (48)..(48): / replace = "Leu"
  VARIANT (49)..(49): / replace = "Gln"
  VARIANT (50)..(50): / replace = "Glu"
AADKHWSDGALEADLRRADFRAKQRAMEDALMALEFVKNIHDMMVSKMYK

SEQ ID NO: 692 - protein, 29 aa, Artificial sequence
  motif 23
  VARIANT (3)..(3): / replace = "Cys"
  VARIANT (8)..(8): / replace = "Val"
  VARIANT (12)..(12): / replace = "Glu"
  VARIANT (22)..(22): / replace = "Lys"
  VARIANT (29)..(29): / replace = "His" / replace = "Asn"
RARQDVAILGSGFLKLDARAREDTEKIDR

SEQ ID NO: 693 - protein, 15 aa, Artificial sequence
  motif 24
  VARIANT (2)..(2): / replace = "Ala"
  VARIANT (5)..(5): / replace = "Cys"
  VARIANT (10)..(10): / replace = "Asn"
  VARIANT (12)..(12): / replace = "Ala"
  VARIANT (14)..(14): / replace = "Phe"
  VARIANT (15)..(15): / replace = "Val"
LSEADGIDYTDPEEL

SEQ ID NO: 694 - protein, 50 aa, Artificial sequence
  motif 25
  VARIANT (18)..(18): / replace = "Thr"
  VARIANT (30)..(30): / replace = "Gly"
  VARIANT (32)..(32): / replace = "Ala"
  VARIANT (48)..(48): / replace = "Gln"
EADGIDYTDPEELELLVATLIDLDAMDGKSSVSLLAECSSSPDVNTRKAL

SEQ ID NO: 695 - protein, 29 aa, Artificial sequence
  motif 26
  VARIANT (6)..(6): / replace = "Ile"
  VARIANT (20)..(20): / replace = "Gln"
  VARIANT (24)..(24): / replace = "Tyr"
  VARIANT (26)..(26): / replace = "Val"
  VARIANT (28)..(28): / replace = "Arg"
APSMWTLGNAGMGALQRLAEDSNPAIAAA

SEQ ID NO: 696 - protein, 21 aa, Artificial sequence
  motif 27
  VARIANT (7)..(7): / replace = "Ala"
  VARIANT (9)..(9): / replace = "Gln"
  VARIANT (14)..(14): / replace = "Glu"
  VARIANT (19)..(19): / replace = "Asp"
FPGEVSTDRITAIQEAYWSMA

SEQ ID NO: 697 - protein, 50 aa, Artificial sequence
  motif 28
  VARIANT (16)..(16): / replace = "Thr"
  VARIANT (28)..(28): / replace = "Ser" / replace = "Arg"
  VARIANT (30)..(30): / replace = "Ala"
  VARIANT (33)..(33): / replace = "Ile"
DGIDYTDPEELELLVATLIDLDAMDGKKSVSLLAECSSSPDVNTRKALAN

SEQ ID NO: 698 - protein, 50 aa, Artificial sequence
  motif 29
  VARIANT (5)..(5): / replace = "Ile"
  VARIANT (19)..(19): / replace = "Glu"
  VARIANT (21)..(21): / replace = "Pro"
  VARIANT (23)..(23): / replace = "Pro"
  VARIANT (25)..(25): / replace = "Ile"
  VARIANT (27)..(27): / replace = "Ala"
  VARIANT (30)..(30): / replace = "Thr"
  VARIANT (34)..(34): / replace = "Asp"
  VARIANT (35)..(35): / replace = "Ala"
  VARIANT (37)..(37): / replace = "Thr"
  VARIANT (42)..(42): / replace = "Val"
PSMWTLGNAGMGALQRLAQDSNYAVARAASRAINELKKQWELEEGDSLRF

SEQ ID NO: 699 - protein, 50 aa, Artificial sequence
  motif 30
  VARIANT (1)..(1): / replace = "Leu"
  VARIANT (2)..(2): / replace = "Val"
  VARIANT (3)..(3): / replace = "Thr"
  VARIANT (5)..(5): / replace = "Glu" / replace = "Arg"
  VARIANT (6)..(6): / replace = "Thr"
  VARIANT (7)..(7): / replace = "Gly"
  VARIANT (8)..(8): / replace = "Thr"
  VARIANT (9)..(9): / replace = "Arg"
  VARIANT (10)..(10): / replace = "Asp" / replace = "Gly"
  VARIANT (11)..(11): / replace = "Arg"
  VARIANT (13)..(13): / replace = "Ser"
  VARIANT (19)..(19): / replace = "Lys" / replace = "Ile"
  VARIANT (20)..(20): / replace = "Ala"
  VARIANT (21)..(21): / replace = "Phe"
  VARIANT (22)..(22): / replace = "Gly"
  VARIANT (23)..(23): / replace = "Phe"
  VARIANT (26)..(26): / replace = "His"
  VARIANT (30)..(30): / replace = "Ser" / replace = "Ala"
  VARIANT (32)..(32): / replace = "Arg"
  VARIANT (34)..(34): / replace = "Ser" / replace = "Tyr"
  VARIANT (38)..(38): / replace = "Gln"
  VARIANT (41)..(41): / replace = "Lys" / replace = "Gln"
  VARIANT (47)..(47): / replace = "Phe"
GSSSPANSTSFITLEKNGNTLELFPGEVSTDQITAIEEAYWSMASALSEA

SEQ ID NO: 700 - DNA, 2194 bp, Oryza sativa; identical to SEQ ID NO: 264

SEQ ID NO: 701 - DNA, 54 bp, Artificial sequence
  primer: prm12099
ggggacaagtttgtacaaaaaagcaggcttaaacaatggctactcgcattcctg

SEQ ID NO: 702 - DNA, 51 bp, Artificial sequence
  primer: prm12100
ggggaccactttgtacaagaaagctgggtttcttatttgcacatgatcacc
